(19) United States
(12) Patent Application Publication
(10) Pub. No.: US 2002/0137081 A1
(43) Pub. Date: Sep. 26, 2002

(54) Genes differentially expressed in vascular tissue activation

(76) Inventor: Olga Bandman, Mountain View, CA (US)

Correspondence Address: INCYTE GENOMICS, INC., 3160 PORTER DRIVE, PALO ALTO, CA, 94304, US

(21) Appl. No.: 10/044,090

(22) Filed: Jan. 8, 2002

Related U.S. Application Data
(60) Provisional application No. 60/222,469, filed on Jul. 28, 2000.
(60) Provisional application No. 60/260,483, filed on Jan. 8, 2001.

(51) Int. Cl. C12Q 1/68; C07H 21/04; C12M 1/34; C12P 21/02; C12N 5/06

(52) U.S. Cl. 435/6; 536/23.2; 435/287.2; 435/320.1; 435/325

(57) ABSTRACT

The present invention relates to a combination comprising a plurality of cDNAs which are differentially expressed in activated vascular tissue and which may be used in their entirety or in part to diagnose, to stage to treat or to monitor the progression or treatment of a vascular disorder such as atherosclerosis, cancer, coronary artery disease, hypertension, diabetes, preeclempsia, ischemia-reperfusion injury, restenosis, and stroke.

[0001] This application claims the benefit of U.S. provisional application Serial No. 60/260,483, filed Jan. 8 2001.

### FIELD OF THE INVENTION

[0002] The present invention relates to a combination comprising a plurality of cDNAs which are differentially expressed in activated vascular tissue and which may be used entirely or in part to diagnose, to stage, to treat, or to monitor the progression or treatment of disorders such as atherosclerosis.

### BACKGROUND OF THE INVENTION

[0003] Atherosclerosis is a pathological condition characterized by a chronic local inflammatory response within the vessel wall of major arteries. Disease progression results in the formation of atherosclerotic lesions, unstable plaques which occasionally rupture, precipitating a catastrophic thrombotic occlusion of the vessel lumen. Atherosclerosis and the associated coronary artery disease and cerebral stroke represent the most common causes of death in industrialized nations. Although certain key risk factors have been identified, a full molecular characterization that elucidates the causes and identifies all potential therapeutic targets for this complex disease has not been achieved. Molecular characterization of atherosclerosis requires identification of the genes that contribute to lesion growth, stability, dissolution, rupture and induction of occlusive vessel thrombi.

[0004] Blood vessel walls are composed of two tissue layers: an endothelial cell (EC) layer which comprises the lumenal surface of the vessel, and an underlying vascular smooth muscle cell (VSMC) layer. Through dynamic interactions with each other and with surrounding tissues, the vascular endothelium and smooth muscle tissues maintain vascular tone, control selective permeability of the vascular wall, direct vessel remodeling and angiogenesis, and modulate inflammatory and immune responses.

[0005] The inflammatory response is a complex vascular reaction mediated by numerous cytokines, chemokines, growth factors, and other signaling molecules expressed by activated ECs, VSMCs and leukocytes. Inflammation protects the organism during trauma and infection, but can also lead to pathological conditions such as atherosclerosis. The pro-inflammatory cytokines, interleukin (IL)-1 and tumor necrosis factor (TNF), are secreted by a small number of activated macrophages or other cells and can set off a cascade of vascular changes, largely through their ability to alter gene expression patterns in ECs and VSMCs. These vascular changes include vasodilation and increased permeability of microvasculature, edema, and leukocyte extravasation and transmigration across the vessel wall. Ultimately, leukocytes, particularly neutrophils and monocytes/macrophages, accumulate in the extravascular space, where they remove injurious agents by phagocytosis and oxidative killing, a process accompanied by release of toxic factors, such as proteases and reactive oxygen species.

[0006] IL-1 and TNF induce pro-inflammatory, thrombotic, and anti-apoptotic changes in gene expression by signaling through receptors on the surface of ECs and VSMCs; these receptors activate transcription factors such as NFkB as well as AP-1, IRF-1, and NF-GMα, leading to alterations in gene expression. Genes known to be differentially regulated in EC by IL-1 and TNF include E selectin, VCAM-1, ICAM-1, PAF, IkBα, LAP-1, MCP-1, eotaxin, ENA-78, G-CSF, A20, ICE, and complement C3 component. A key event in inflammation, adhesion and transmigration of blood leukocytes across the vascular endothelium, for example, is mediated by increased expression of E selectin, P selectin, ICAM-1, and VCAM-1 on activated endothelium.

[0007] Several investigators have examined changes in vascular cell gene expression associated with various inflammatory diseases or model systems. Examining human umbilical vein endothelial cells (HUVEC) activated by recombinant TNFα or conditioned medium from activated human primary monocytes, Horrevoets et al. (1999; Blood 93:3418-3431) identified 106 differentially regulated genes. In a similar approach, deVries et al. (2000; JBC 275:23939-23947) identified 40 differentially regulated genes in umbilical cord artery-derived smooth muscle cells activated by conditioned media from cultured macrophages after stimulation with oxidized LDL particles. In both studies, many of the identified genes were already known to be involved in inflammation. Comparing expression profiles from inflammatory diseased tissues, cultured macrophages, chondrocyte cell lines, primary chondrocytes, and synoviocytes, Heller et al. (1997; Proc Natl Acad Sci 94:2150-2155) identified candidate genes involved in inflammatory responses, including TNF, IL-1 IL-6, IL-8 G-CSF, RANTES, and V-CAM. From this candidate gene set, tissue inhibitor of metalloproteinase 1, ferritin light chain, and manganese superoxide dismutase were found to be differentially expressed in rheumatoid arthritis (RA) but not in inflammatory bowel disease (IBD). Further, IL-3, chemokine Groα, and metalloproteinase matrix metalloelastase were expressed in both RA and IBD. Most recently, in an analysis of cultured aortic smooth muscle cells treated with TNFα, Haley et al. (2000; Circulation 102:2185-2189) found a 20-fold increase in eotaxin, an eosinophil chemotactic factor. The overexpression of eotaxin and its receptor CCR3 in atherosclerotic lesions was confirmed by northern analysis.

[0008] Array technology can provide a simple way to explore the expression of a single polymorphic gene or the expression profile of a large number of related or unrelated genes. When the expression of a single gene is examined, arrays are employed to detect the expression of that specific gene or its variants. When an expression profile is examined, arrays provide a platform for identifying genes that are tissue specific, carry out housekeeping functions, are part of a signaling cascade, or are specifically related to a particular genetic predisposition, condition, disease, or disorder. The potential application of gene expression profiling is particularly relevant to improving diagnosis, prognosis, and treatment of disease. For example, both the levels and sequences expressed in tissues from subjects with coronary artery disease may be compared with the levels and sequences expressed in normal vascular tissue.

[0009] The present invention provides for a combination comprising a plurality of cDNAs for use in detecting changes in expression of genes encoding proteins that are associated with activated vascular tissue. The present invention satisfies a need in the art in that it provides a combination of differentially expressed cDNAs which may be used entirely or in part to diagnose, to stage, to treat, or to monitor the progression or treatment of a disorder such as atherosclerosis.

### SUMMARY

[0010] The present invention provides a combination comprising a plurality of cDNAs which are differentially expressed in vascular endothelium and/or smooth muscle and which have nucleic acid sequences, SEQ ID NOs: 1-850, as presented in the Sequence Listing or their complements. In one embodiment, each cDNA is downregulated at least 2.5-fold in both activated endothelial and smooth muscle tissue, SEQ ID NOs: 1-15; in another embodiment, each cDNA is downregulated at least 2.5-fold in activated vascular endothelial tissue, SEQ ID NOs: 16-228; in yet another embodiment, each cDNA is downregulated at least 2.5-fold in activated vascular smooth muscle tissue, SEQ ID NOs: 229-437. In still another embodiment, each cDNA is upregulated at least 2.5-fold in activated vascular endothelial tissue, SEQ ID NOs: 438-760; in still yet another embodiment, each cDNA is upregulated at least 2.5-fold in activated vascular smooth muscle tissue, SEQ ID NOs: 761-812; and in a further embodiment, each cDNA is upregulated at least 2.5-fold in both activated vascular endothelial and smooth muscle tissue, SEQ ID NOs: 813-850. In one aspect, the combination is useful to diagnose a vascular disorder selected from atherosclerosis, cancer, coronary artery disease, hypertension, diabetes, preeclempsia, ischemia-reperfusion injury, restenosis, and stroke. In another aspect, the combination is immobilized on a substrate.

[0011] The invention also provides a high throughput method to detect differential expression of one or more of the cDNAs of the combination. The method comprises hybridizing the substrate comprising the combination with the nucleic acids of a sample, thereby forming one or more hybridization complexes, detecting the hybridization complexes, and comparing the hybridization complexes with those of a standard, wherein differences in the size and signal intensity of each hybridization complex indicates differential expression of nucleic acids in the sample. In one aspect, the sample is from a subject with atherosclerosis and differential expression determines an early, mid, and late stage of that disorder.

[0012] The invention further provides a high throughput method of screening a library or a plurality of molecules or compounds to identify a ligand. The method comprises contacting the substrate comprising the combination with a library or plurality of molecules or compounds under conditions to allow specific binding and detecting specific binding, thereby identifying a ligand. The library or plurality of molecules or compounds are selected from DNA molecules, RNA molecules, peptide nucleic acid molecules, mimetics, peptides, transcription factors, repressors, and other regulatory proteins. The invention additionally provides a method for purifying a ligand, the method comprising combining a cDNA of the invention with a sample under conditions which allow specific binding, recovering the bound cDNA, and separating the cDNA from the ligand, thereby obtaining purified ligand.

[0013] The invention still further provides an isolated cDNA selected from SEQ ID NOs: 13-15, 170-205, 372-437, 669-760, 794-812, and 846-850 as presented in the Sequence Listing. The invention also provides a vector comprising the cDNA, a host cell comprising the vector, and a method for producing a protein comprising culturing the host cell under conditions for the expression of a protein and recovering the protein from the host cell culture.

[0014] The present invention provides a purified protein encoded and produced by a cDNA of the invention. The invention also provides a high-throughput method for using a protein to screen a library or a plurality of molecules or compounds to identify a ligand. The method comprises combining the protein or a portion thereof with the library or plurality of molecules or compounds under conditions to allow specific binding and detecting specific binding, thereby identifying a ligand which specifically binds the protein. The library or plurality of molecules or compounds are selected from DNA molecules, RNA molecules, peptide nucleic acid molecules, mimetics, peptides, proteins, agonists, antagonists, antibodies or their fragments, immunoglobulins, inhibitors, drug compounds, and pharmaceutical agents. The invention further provides for using a protein to purify a ligand. The method comprises combining the protein or a portion thereof with a sample under conditions to allow specific binding, recovering the bound protein, and separating the protein from the ligand, thereby obtaining purified ligand. The invention still further provides a pharmaceutical composition comprising the protein. The invention yet still further provides a method for using the protein to produce or to isolate and purify an antibody. The method comprises immunizing an animal with the protein or an antigenically-effective epitope under conditions to elicit an antibody response, isolating animal antibodies, and screening the isolated antibodies with the protein to identify an antibody which specifically binds the protein.

[0015] The invention provides a purified antibody, a composition comprising a purified antibody and a labeling moiety, and a pharmaceutical agent comprising the purified antibody. The invention also provides a method for detecting a protein in a sample by combining a purified antibody with a sample under conditions to allow specific binding; and detecting specific binding, wherein specific binding indicates the presence of the protein in the sample. The invention further provides a method of using an antibody to purify a natural or a recombinant protein from a sample by combining a purified antibody with a sample under conditions to allow specific binding and separating the antibody from the protein, thereby obtaining purified protein.

### DESCRIPTION OF THE COMPACT DISK-RECORDABLE (CD-R) SEQUENCE LISTING AND TABLES

[0016] CD-R 1 contains the Sequence Listing formatted in ASCII text. CD-R 1 is labeled with Identification No. PA-0028 US, Copy 1. The file containing the Sequence Listing is entitled pa0028us_seq.txt, created on Jan. 8, 2001, and is 2.31 MB in size.

[0017] CD-R 2 is an exact copy of CD-R 1. CD-R 2 is labeled with Identification No. PA-0028 US, Copy 2.

[0018] CD-R 3 contains the Computer Readable Form of the Sequence Listing in compliance with 37 C.F.R. §1.821(e), and specified by 37 C.F.R. §1.824. CD-R 3 is labeled with Identification No. PA-0028 P, Copy 3. The file containing the Sequence Listing is entitled pa0028us_seq.txt, created on Jan. 8, 2001, and is 2.31 MB in size.

[0019] The disclosure of the Sequence Listing submitted as an electronic document on compact disc as described above is to be part of the permanent USPTO record of this patent application and is hereby expressly incorporated by reference.

[0020] A portion of the disclosure of this patent document contains material that is subject to copyright protection. The copyright owner has no objection to the facsimile reproduction by anyone of the patent document or the patent disclosure, as it appears in the Patent and Trademark Office patent file or records, but otherwise reserves all copyright rights whatsoever.

[0021] The Sequence Listing is a compilation of cDNAs obtained by sequencing and extension of clone inserts. Each sequence is identified by a sequence identification number (SEQ ID NO) and by the Incyte identification number (Incyte ID NO) from which it was obtained.

[0022] Table 1 lists the functional annotation and differential expression of the cDNAs of the present invention. Columns 1, 2, and 3 show the SEQ ID NO, Template ID, and Clone ID, respectively. Columns 4, 5, and 6 show the GenBank hit (Hit ID), probability score (E-value), and functional annotation (Annotation), respectively, as determined by BLAST analysis (version 1.4 using default parameters; Altschul (1993) J Mol Evol 36: 290-300; Altschul et al. (1990) J Mol Biol 215:403-410) of the cDNA against GenBank (release 120; National Center for Biotechnology Information (NCBI), Bethesda Md.). Column 7 shows the differential expression of each cDNA in TNFα- and IL-1β-treated vascular endothelium versus untreated endothelium (endo act/endo). Column 8 shows the differential expression of each cDNA in TNFα- and IL-1β-treated vascular smooth muscle versus untreated smooth muscle (smusc act/smusc). Values are in log base 2; negative values indicate downregulation.

[0023] Table 2 shows the region of each cDNA encompassed by the clone present on a microarray and identified as differentially expressed. Columns 1 and 2 show the SEQ ID NO and Template ID, respectively. Column 3 shows the Clone ID and columns 4 and 5 show the first residue (START) and last residue (STOP) encompassed by the clone on the template.

[0024] Table 3 shows Pfam (Bateman et al. (2000) Nucleic Acids Res 28:263-266) annotations of the cDNAs of the present invention. Columns 1 and 2 show the SEQ ID NO and Template ID, respectively. Columns 3, 4, and 5 show the first residue (START), last residue (STOP), and reading frame, respectively, for the segment of the cDNA identified by Pfam analysis. Columns 6, 7, and 8 show the Pfam ID, Pfam description, and E-values, respectively, corresponding to the polypeptide domain encoded by the cDNA.

[0025] Table 4 shows signal peptide and transmembrane regions predicted within the cDNAs of the present invention. Columns 1 and 2 show the SEQ ID NO and Template ID, respectively. Columns 3, 4, and 5 show the first residue (START), last residue (STOP), and reading frame, respectively, for a segment of the cDNA, and column 6 identifies the polypeptide encoded by the segment as either a signal peptide (SP) or transmembrane (TM) domain.

### DESCRIPTION OF THE INVENTION

[0026] Definitions

[0027] “Activated vascular tissue”, “activated vascular endothelium”, and “activated vascular smooth muscle” refers to vascular tissue, vascular endothelium, or vascular smooth muscle, respectively, that exhibits morphological and/or physiological changes including changes in gene expression similar to changes exhibited upon exposure to TNFα, IL-1β, or a combination of TNFα and IL-1β.

[0028] “Array” refers to an ordered arrangement of at least two cDNAs, proteins, or antibodies on a substrate. At least one of the cDNAs, proteins, or antibodies represents a control or standard, and the other, a cDNA, protein, or antibody of diagnostic or therapeutic interest. The arrangement of two to about 40,000 cDNAs, proteins, or antibodies on the substrate assures that the size and signal intensity of each labeled complex, formed between each cDNA and at least one nucleic acid, or antibody:protein complex, formed between each antibody and at least one protein to which the antibody specifically binds, is individually distinguishable.

[0029] A “combination” refers to at least two and up to 850 cDNAs having nucleic acid sequences selected from SEQ ID NOs: 1-850 and their complements as presented in the Sequence Listing.

[0030] The “complement” of a nucleic acid molecule of the Sequence Listing refers to a cDNA which is completely complementary over the full length of the sequence and which will hybridize to the nucleic acid molecule under conditions of high stringency.

[0031] “cDNA” refers to a chain of nucleotides, an isolated polynucleotide, nucleic acid molecule, or any fragment or complement thereof. It may have originated recombinantly or synthetically, be double-stranded or single-stranded, coding and/or noncoding, an exon with or without an intron from a genomic DNA molecule, and purified or combined with carbohydrate, lipids, protein or inorganic elements or substances. Preferably, the cDNA is from about 400 to about 10,000 nucleotides.

[0032] The phrase “cDNA encoding a protein” refers to a nucleic acid sequence that closely aligns with sequences which encode conserved regions, motifs or domains that were identified by employing analyses well known in the art. These analyses include BLAST (Basic Local Alignment Search Tool; Altschul (1993) J Mol Evol 36: 290-300; Altschul et al. (1990) J Mol Biol 215:403-410) which provides identity within the conserved region. Brenner et al. (1998; Proc Natl Acad Sci 95:6073-6078) who analyzed BLAST for its ability to identify structural homologs by sequence identity found 30% identity is a reliable threshold for sequence alignments of at least 150 residues and 40% is a reasonable threshold for alignments of at least 70 residues (Brenner et al., page 6076, column 2).

[0033] “Derivative” refers to a cDNA or a protein that has been subjected to a chemical modification. Derivatization of a cDNA can involve substitution of a nontraditional base such as queosine or of an analog such as hypoxanthine. These substitutions are well known in the art. Derivatization of a protein involves the replacement of a hydrogen by an acetyl, acyl, alkyl, amino, formyl, or morpholino group. Derivative molecules retain the biological activities of the naturally occurring molecules but may confer advantages such as longer lifespan or enhanced activity.

[0034] “Differential expression” refers to an increased, upregulated or present, or decreased, downregulated or absent, gene expression as detected by the absence, presence, or at least two-fold changes in the amount of transcribed messenger RNA or translated protein in a sample.

[0035] “Disorder” refers to conditions, diseases or syndromes of the vascular tissue including atherosclerosis, cancer, coronary artery disease, hypertension, diabetes, preeclempsia, ischemia-reperfusion injury, restenosis, and stroke.

[0036] “Fragment” refers to a chain of consecutive nucleotides from about 200 to about 700 base pairs in length. Fragments may be used in PCR or hybridization technologies to identify related nucleic acid molecules and in binding assays to screen for a ligand. Nucleic acids and their ligands identified in this manner are useful as therapeutics to regulate replication, transcription or translation.

[0037] A “hybridization complex” is formed between a cDNA and a nucleic acid of a sample when the purines of one molecule hydrogen bond with the pyrimidines of the complementary molecule, e.g., 5′-A-G-T-C-3′ base pairs with 3′-T-C-A-G-5′. The degree of complementarity and the use of nucleotide analogs affect the efficiency and stringency of hybridization reactions.

[0038] “Identity” as applied to nucleic acid or protein sequences, refers to the quantification (usually percentage) of nucleotide or residue matches between at least two sequences aligned using a standardized algorithm such as Smith-Waterman alignment (Smith and Waterman (1981) J Mol Biol 147:195-197), CLUSTALW (Thompson et al. (1994) Nucleic Acids Res 22:4673-4680), or BLAST2 (Altschul et al. (1997) Nucleic Acids Res 25:3389-3402). BLAST2 may be used in a standardized and reproducible way to insert gaps in one of the sequences in order to optimize alignment and to achieve a more meaningful comparison between them. Similarity is an analogous score, but it is calculated with conservative substitutions of residues taken into account; for example, substitution of a valine for a isoleucine or leucine.

[0039] “Ligand” refers to any agent, molecule, or compound which will bind specifically to a complementary site on a cDNA molecule or polynucleotide, or to an epitope or a protein. Such ligands stabilize or modulate the activity of polynucleotides or proteins and may be composed of inorganic or organic substances including nucleic acids, proteins, carbohydrates, fats, and lipids.

[0040] “Oligonucleotide” refers a single stranded molecule from about 18 to about 60 nucleotides in length which may be used in hybridization or amplification technologies or in regulation of replication, transcription or translation. Substantially equivalent terms are amplimer, primer, and oligomer.

[0041] “Portion” refers to any part of a protein used for any purpose which retains at least one biological or antigenic characteristic of a native protein, but especially, to an epitope for the screening of ligands or for the production of antibodies.

[0042] “Post-translational modification” of a protein can involve lipidation, glycosylation, phosphorylation, acetylation, racemization, proteolytic cleavage, and the like. These processes may occur synthetically or biochemically. Biochemical modifications will vary by cellular location, cell type, pH, enzymatic milieu, and the like.

[0043] “Probe” refers to a cDNA that hybridizes to at least one nucleic acid molecule in a sample. Where targets are single stranded, probes are complementary single strands. Probes can be labeled with reporter molecules for use in hybridization reactions including Southern, northern, in situ, dot blot, array, and like technologies or in screening assays.

[0044] “Protein” refers to a polypeptide or any portion thereof. An “oligopeptide” is an amino acid sequence from about five residues to about 15 residues that is used as part of a fusion protein to produce an antibody.

[0045] “Purified” refers to any molecule or compound that is separated from its natural environment and is from about 60% free to about 90% free from other components with which it is naturally associated.

[0046] “Sample” is used in its broadest sense as containing nucleic acids, proteins, antibodies, and the like. A sample may comprise a bodily fluid; the soluble fraction of a cell preparation, or an aliquot of media in which cells were grown; a chromosome, an organelle, or membrane isolated or extracted from a cell; genomic DNA, RNA, or cDNA in solution or bound to a substrate; a cell; a tissue; a tissue print; a fingerprint, buccal cells, skin, or hair; and the like.

[0047] “Specific binding” refers to a special and precise interaction between two molecules which is 30 dependent upon their structure, particularly their molecular side groups. For example, the intercalation of a regulatory protein into the major groove of a DNA molecule, the hydrogen bonding along the backbone between two single stranded nucleic acids, or the binding between an epitope of a protein and an agonist, antagonist, or antibody.

[0048] “Substrate” refers to any rigid or semi-rigid support to which cDNAs or proteins are bound and includes membranes, filters, chips, slides, wafers, fibers, magnetic or nonmagnetic beads, gels, capillaries or other tubing, plates, polymers, and microparticles with a variety of surface forms including wells, trenches, pins, channels and pores.

[0049] “Template” refers to a consensus sequence that was created using the LIFESEQ GOLD database and the assembly algorithm described in U.S. Ser. No. 09/276,534, filed Mar. 25, 1999 and incorporated by reference herein.

[0050] A “transcript image” is an expression profile which documents gene transcription activity in a particular tissue at a particular time as described in U.S. Pat. No. 6,114,114 which issued Sep. 5, 2000 and is incorporated herein by reference.

[0051] “Variant” refers to molecules that are recognized variations of a cDNA or a protein encoded by the cDNA. Splice variants may be determined by BLAST score, wherein the score is at least 100, and most preferably at least 400. Allelic variants have a high percent identity to the cDNAs and may differ by about three bases per hundred bases. “Single nucleotide polymorphism” (SNP) refers to a change in a single base as a result of a substitution, insertion or deletion. The change may be conservative (purine for purine) or non-conservative (purine to pyrimidine) and may or may not result in a change in an encoded amino acid.

[0052] The Invention

[0053] The present invention provides for a combination comprising a plurality of cDNAs or their complements, SEQ ID NOs: 1-850 which may be used on a substrate to diagnose, to stage, to treat or to monitor the progression or treatment of a vascular disorder. These cDNAs represent known and novel genes differentially expressed in vascular endothelial and smooth muscle cells or tissues treated with TNFα and IL-1β. The combination may be used in its entirety or in part, as subsets of downregulated cDNAs, SEQ ID NOs: 1-437, or of upregulated cDNAs, SEQ ID NOs: 438-850. In one embodiment, the cDNAs are downregulated at least 2.5-fold in both activated vascular endothelial and smooth muscle tissue, SEQ ID NOs: 1-15; in another embodiment, each cDNA is downregulated at least 2.5-fold in activated vascular endothelial tissue, SEQ ID NOs: 16-228; in yet another embodiment, each cDNA is downregulated at least 2.5-fold in activated vascular smooth muscle tissue, SEQ ID NOs: 229-437. In another embodiment, each cDNA is upregulated at least 2.5-fold in activated vascular endothelial tissue, SEQ ID NOs: 438-760; in yet another embodiment, each cDNA is upregulated at least 2.5-fold in activated vascular smooth muscle tissue, SEQ ID NOs: 761-812; and in a further embodiment, each cDNA is upregulated at least 2.5-fold in both activated vascular endothelial and smooth muscle tissue, SEQ ID NOs: 813-850.

[0054] SEQ ID NOs: 13-15, 170-205, 372-437, 669-760, 794-812, and 846-850 represent novel cDNAs associated with vascular tissue activation. Since the novel cDNAs were identified solely by their differential expression, it is not essential to know a priori the name, structure, or function of the gene or it's encoded protein. The usefulness of the novel cDNAs exists in their immediate value as diagnostics for vascular disorders such as atherosclerosis.

[0055] Table 1 lists the functional annotation and differential expression of the cDNAs of the present invention. Columns 1, 2, and 3 show the SEQ ID NO, Template ID, and Clone ID, respectively. Columns 4, 5, and 6 show the GenBank hit, probability score, and functional annotation, respectively. Column 7 shows the differential expression of each cDNA in TNFα and IL-1β treated vascular endothelium versus untreated endothelium, and column 8 shows the differential expression of each cDNA in TNFα and IL-1β treated vascular smooth muscle versus untreated smooth muscle. Differential expression values are in log base 2; negative values indicate downregulation. Table 2 shows the region of each cDNA encompassed by the clone present on a microarray and identified as differentially expressed at least 2.5-fold. Columns 1 and 2 show the SEQ ID NO and Template ID, respectively. Column 3 shows the Clone ID and columns 4 and 5 show the first and last residue encompassed by the clone on the template.

[0056] Table 3 shows Pfam annotations of the cDNAs of the present invention. Pfam is a database of multiple alignments of protein domains or conserved protein regions. The alignments identify structures which have implications for the protein's function. Profile Hidden Markov Models (profile HMMs) built from the Pfam alignments are useful for automatically recognizing that a new protein belongs to an existing protein family, even if the homology is weak. Columns 1 and 2 show the SEQ ID NO and Template ID, respectively. Columns 3, 4, and 5 show the first residue (START), last residue (STOP), and reading frame, respectively, for the segment of the cDNA identified by Pfam analysis. Columns 6, 7, and 8 show the Pfam ID, Pfam description, and E-values, respectively, corresponding to the polypeptide domain encoded by the cDNA segment.

[0057] The cDNAs of the invention define a differential expression pattern against which to compare the expression pattern of biopsied and/or in vitro treated vascular tissues. Experimentally, differential expression of the cDNAs can be evaluated by methods including, but not limited to, differential display by spatial immobilization or by gel electrophoresis, genome mismatch scanning, representational discriminate analysis, clustering, transcript imaging and array technologies. These methods may be used alone or in combination.

[0058] The combination may be arranged on a substrate and hybridized with tissues from subjects with diagnosed vascular system disorders to identify those sequences which are differentially expressed in disorders such as atherosclerosis, cancer, coronary artery disease, hypertension, diabetes, preeclempsia, ischemia-reperfusion injury, restenosis, and stroke. This allows identification of those sequences of highest diagnostic and potential therapeutic value. In one embodiment, an additional set of cDNAs, such as cDNAs encoding signaling molecules, are arranged on the substrate with the combination. Such combinations may be useful in the elucidation of pathways which are affected in a particular vascular disorder or to identify new, coexpressed, candidate, therapeutic molecules.

[0059] In another embodiment, the combination can be used for large scale genetic or gene expression analysis of a large number of novel, nucleic acid molecules. These samples are prepared by methods well known in the art and are from mammalian cells or tissues which are in a certain stage of development; have been treated with a known molecule or compound, such as a cytokine, growth factor, a drug, and the like; or have been extracted or biopsied from a mammal with a known or unknown condition, disorder, or disease before or after treatment. The sample nucleic acid molecules are hybridized to the combination for the purpose of defining a novel expression profile associated with that developmental stage, treatment, or disorder.

[0060] cDNAs and Their Uses

[0061] cDNAs can be prepared by a variety of synthetic or enzymatic methods well known in the art. cDNAs can be synthesized, in whole or in part, using chemical methods well known in the art (Caruthers et al. (1980) Nucleic Acids Symp Ser (7)215-233). Alternatively, cDNAs can be produced enzymatically or recombinantly, by in vitro or in vivo transcription.

[0062] Nucleotide analogs can be incorporated into cDNAs by methods well known in the art. The only requirement is that the incorporated analog must base pair with native purines or pyrimidines. For example, 2, 6-diaminopurine can substitute for adenine and form stronger bonds with thymidine than those between adenine and thymidine. A weaker pair is formed when hypoxanthine is substituted for guanine and base pairs with cytosine. Additionally, cDNAs can include nucleotides that have been derivatized chemically or enzymatically.

[0063] cDNAs can be synthesized on a substrate. Synthesis on the surface of a substrate may be accomplished using a chemical coupling procedure and a piezoelectric printing apparatus as described by Baldeschweiler et al. (PCT publication WO95/251116). Alternatively, the cDNAs can be synthesized on a substrate surface using a self-addressable electronic device that controls when reagents are added as described by Heller et al. (U.S. Pat. No. 5,605,662). cDNAs can be synthesized directly on a substrate by sequentially dispensing reagents for their synthesis on the substrate surface or by dispensing preformed DNA fragments to the substrate surface. Typical dispensers include a micropipette delivering solution to the substrate with a robotic system to control the position of the micropipette with respect to the substrate. There can be a multiplicity of dispensers so that reagents can be delivered to the reaction regions efficiently.

[0064] cDNAs can be immobilized on a substrate by covalent means such as by chemical bonding procedures or UV irradiation. In one method, a cDNA is bound to a glass surface which has been modified to contain epoxide or aldehyde groups. In another method, a cDNA is placed on a polylysine coated surface and UV cross-linked to it as described by Shalon et al. (WO95/35505). In yet another method, a cDNA is actively transported from a solution to a given position on a substrate by electrical means (Heller, supra). cDNAs do not have to be directly bound to the substrate, but rather can be bound to the substrate through a linker group. The linker groups are typically about 6 to 50 atoms long to provide exposure of the attached cDNA. Preferred linker groups include ethylene glycol oligomers, diamines, diacids and the like. Reactive groups on the substrate surface react with a terminal group of the linker to bind the linker to the substrate. The other terminus of the linker is then bound to the cDNA. Alternatively, polynucleotides, plasmids or cells can be arranged on a filter. In the latter case, cells are lysed, proteins and cellular components degraded, and the DNA is coupled to the filter by UV cross-linking.

[0065] The cDNAs may be used for a variety of purposes. For example, the combination of the invention may be used on an array. The array, in turn, can be used in high-throughput methods for detecting a related polynucleotide in a sample, screening a plurality of molecules or compounds to identify a ligand, diagnosing a vascular disorder such as atherosclerosis, or inhibiting or inactivating a therapeutically relevant gene related to the cDNA.

[0066] When the cDNAs of the invention are employed on a microarray, the cDNAs are arranged in an ordered fashion so that each cDNA is present at a specified location. Because the cDNAs are at specified locations on the substrate, the hybridization patterns and intensities, which together create a unique expression profile, can be interpreted in terms of expression levels of particular genes and can be correlated with a particular metabolic process, condition, disorder, disease, stage of disease, or treatment.

[0067] Hybridization

[0068] The cDNAs or fragments or complements thereof may be used in various hybridization technologies. The cDNAs may be labeled using a variety of reporter molecules by either PCR, recombinant, or enzymatic techniques. For example, a commercially available vector containing the cDNA is transcribed in the presence of an appropriate polymerase, such as T7 or SP6 polymerase, and at least one labeled nucleotide. Commercial kits are available for labeling and cleanup of such cDNAs. Radioactive (Amersham Pharmacia Biotech (APB), Piscataway N.J.), fluorescent (Operon Technologies, Alameda Calif.), and chemiluminescent labeling (Promega, Madison Wis.) are well known in the art.

[0069] A cDNA may represent the complete coding region of an mRNA or be designed or derived from unique regions of the mRNA or genomic molecule, an intron, a 3′ untranslated region, or from a region containing a conserved motif or domain. The cDNA is at least 18 contiguous nucleotides in length and is usually single stranded. Such a cDNA may be used under hybridization conditions that allow binding only to an identical sequence, a naturally occurring molecule encoding the same protein, or an allelic variant. Discovery of related human and mammalian sequences may also be accomplished using a pool of degenerate cDNAs and appropriate hybridization conditions. Generally, a cDNA for use in Southern or northern hybridizations may be from about 400 to about 6000 nucleotides long. Such cDNAs have high binding specificity in solution-based or substrate-based hybridizations. An oligonucleotide, a fragment of the cDNA, may be used to detect a polynucleotide in a sample using PCR.

[0070] The stringency of hybridization is determined by G+C content of the cDNA, salt concentration, and temperature. In particular, stringency is increased by reducing the concentration of salt or raising the hybridization temperature. In solutions used for some membrane based hybridizations, addition of an organic solvent such as formamide allows the reaction to occur at a lower temperature. Hybridization may be performed with buffers, such as 5× saline sodium citrate (SSC) with 1% sodium dodecyl sulfate (SDS) at 60° C., that permit the formation of a hybridization complex between nucleic acid sequences that contain some mismatches. Subsequent washes are performed with buffers such as 0.2×SSC with 0.1% SDS at either 45°-60° C. (medium stringency) or 65°-68° C. (high stringency). At high stringency, hybridization complexes will remain stable only where the nucleic acid molecules are completely complementary. In some membrane-based hybridizations, 35% to 50% formamide may be added to the hybridization solution to reduce the temperature at which hybridization is performed. Background signals may be reduced by the use of detergents such as Sarkosyl or Triton X-100 (Sigma Aldrich, St. Louis Mo.) and a blocking agent such as denatured salmon sperm DNA. Selection of components and conditions for hybridization are well known to those skilled in the art and are reviewed in Ausubel et al. (1997, Short Protocols in Molecular Biology, John Wiley & Sons, New York NY, Units 2.8-2.11, 3.18-3.19 and 4.6-4.9).

[0071] Dot-blot, slot-blot, low density and high density arrays are prepared and analyzed using methods known in the art. cDNAs from about 18 consecutive nucleotides to about 5000 consecutive nucleotides in length are contemplated by the invention and used in array technologies. The number of cDNAs on an array is from about 600 to about 100,000. The array may be used to monitor the expression level of large numbers of genes simultaneously and to identify genetic variants, mutations, and SNPs. Such information may be used to determine gene function; to understand the genetic basis of a disorder; to diagnose a disorder; and to develop and monitor the activities of therapeutic agents being used to control or cure a disorder. (See, e.g., U.S. Pat. No. 5,474,796; WO95/11995; WO95/35505; U.S. Pat. No. 5,605,662; and U.S. Pat. No. 5,958,342.)

[0072] Screening and Purification Assays

[0073] A cDNA may be used to screen a library or a plurality of molecules or compounds for a ligand which specifically binds the cDNA. Ligands may be any molecule including DNA molecules, RNA molecules, peptide nucleic acid molecules, peptides, proteins such as transcription factors, promoters, enhancers, repressors, and other proteins that regulate replication, transcription, or translation of the polynucleotide in the biological system. The assay involves combining the cDNA or a fragment thereof with the molecules or compounds under conditions that allow specific binding and detecting the bound cDNA to identify at least one ligand that specifically binds the cDNA.

[0074] In one embodiment, the cDNA may be incubated with a library of isolated and purified molecules or compounds and binding activity determined by methods such as a gel-retardation assay (U.S. Pat. No. 6,010,849) or a reticulocyte lysate transcriptional assay. In another embodiment, the cDNA may be incubated with nuclear extracts from biopsied and/or cultured cells and tissues. Specific binding between the cDNA and a molecule or compound in the nuclear extract is initially determined by gel shift assay. Protein binding may be confirmed by raising antibodies against the protein and adding the antibodies to the gel-retardation assay where specific binding will cause a supershift in the assay.

[0075] In another embodiment, the cDNA may be used to purify a molecule or compound using affinity chromatography methods well known in the art. In one embodiment, the cDNA is chemically reacted with cyanogen bromide groups on a polymeric resin or gel. Then a sample is passed over and reacts with or binds to the cDNA. The molecule or compound which is bound to the cDNA may be released from the cDNA by increasing the salt concentration of the flow-through medium and collected.

[0076] The cDNA may be used to purify a ligand from a sample. A method for using a cDNA to purify a ligand would involve combining the cDNA or a fragment thereof with a sample under conditions to allow specific binding, recovering the bound cDNA, and using an appropriate agent to separate the cDNA from the purified ligand.

[0077] Protein Production and Uses

[0078] The full length cDNAs or fragment thereof may be used to produce purified proteins using recombinant DNA technologies described herein and taught in Ausubel et al. (supra; Units 16.1-16.62). One of the advantages of producing proteins by these procedures is the ability to obtain highly-enriched sources of the proteins thereby simplifying purification procedures.

[0079] The proteins may contain amino acid substitutions, deletions or insertions made on the basis of similarity in polarity, charge, solubility, hydrophobicity, hydrophilicity, and/or the amphipathic nature of the residues involved. Such substitutions may be conservative in nature when the substituted residue has structural or chemical properties similar to the original residue (e.g., replacement of leucine with isoleucine or valine) or they may be nonconservative when the replacement residue is radically different (e.g., a glycine replaced by a tryptophan). Computer programs included in LASERGENE software (DNASTAR, Madison Wis.), MACVECTOR software (Genetics Computer Group, Madison Wis.) and RasMol software (University of Massachusetts, Amherst Mass.) may be used to help determine which and how many amino acid residues in a particular portion of the protein may be substituted, inserted, or deleted without abolishing biological or immunological activity.

[0080] Expression of Encoded Proteins

[0081] Expression of a particular cDNA may be accomplished by cloning the cDNA into a vector and transforming this vector into a host cell. The cloning vector used for the construction of cDNA libraries in the LIFESEQ databases (Incyte Genomics, Palo Alto Calif.) may also be used for expression. Such vectors usually contain a promoter and a polylinker useful for cloning, priming, and transcription. An exemplary vector may also contain the promoter for β-galactosidase, an amino-terminal methionine and the subsequent seven amino acid residues of β-galactosidase. The vector may be transformed into competent E. coli cells. Induction of the isolated bacterial strain with isopropylthiogalactoside (IPTG) using standard methods will produce a fusion protein that contains an N terminal methionine, the first seven residues of β-galactosidase, about 15 residues of linker, and the protein encoded by the cDNA.

[0082] The cDNA may be shuttled into other vectors known to be useful for expression of protein in specific hosts. Oligonucleotides containing cloning sites and fragments of DNA sufficient to hybridize to stretches at both ends of the cDNA may be chemically synthesized by standard methods. These primers may then be used to amplify the desired fragments by PCR. The fragments may be digested with appropriate restriction enzymes under standard conditions and isolated using gel electrophoresis. Alternatively, similar fragments are produced by digestion of the cDNA with appropriate restriction enzymes and filled in with chemically synthesized oligonucleotides. Fragments of the coding sequence from more than one gene may be ligated together and expressed.

[0083] Signal sequences that dictate secretion of soluble proteins are particularly desirable as component parts of a recombinant sequence. For example, a chimeric protein may be expressed that includes one or more additional purification-facilitating domains. Such domains include, but are not limited to, metal-chelating domains that allow purification on immobilized metals, protein A domains that allow purification on immobilized immunoglobulin, and the domain utilized in the FLAGS extension/affinity purification system (Immunex, Seattle Wash.). The inclusion of a cleavable-linker sequence such as ENTEROKINASEMAX (Invitrogen, San Diego Calif.) between the protein and the purification domain may also be used to recover the protein.

[0084] Suitable host cells may include, but are not limited to, mammalian cells such as Chinese Hamster Ovary (CHO) and human 293 cells, insect cells such as Sf9 cells, plant cells such as Nicotiana tabacum, yeast cells such as Saccharomyces cerevisiae, and bacteria such as E. coli. For each of these cell systems, a useful vector may also include an origin of replication and one or two selectable markers to allow selection in bacteria as well as in a transformed eukaryotic host. Vectors for use in eukaryotic host cells may require the addition of 3′ poly(A) tail if the cDNA lacks poly(A).

[0085] Additionally, the vector may contain promoters or enhancers that increase gene expression. Many promoters are known and used in the art. Most promoters are host specific and exemplary promoters includes SV40 promoters for CHO cells; T7 promoters for bacterial hosts; viral promoters and enhancers for plant cells; and PGH promoters for yeast. Adenoviral vectors with the rous sarcoma virus enhancer or retroviral vectors with long terminal repeat promoters may be used to drive protein expression in mammalian cell lines. Once homogeneous cultures of recombinant cells are obtained, large quantities of secreted soluble protein may be recovered from the conditioned medium and analyzed using chromatographic methods well known in the art. An alternative method for the production of large amounts of secreted protein involves the transformation of mammalian embryos and the recovery of the recombinant protein from milk produced by transgenic cows, goats, sheep, and the like.

[0086] In addition to recombinant production, proteins or portions thereof may be produced manually, using solid-phase techniques (Stewart et al. (1969) Solid-Phase Peptide Synthesis, WH Freeman, San Francisco Calif.; Merrifield (1963) J Am Chem Soc 5:2149-2154), or using machines such as the ABI 431A peptide synthesizer (Applied Biosystems (ABI), Foster City Calif.). Proteins produced by any of the above methods may be used as pharmaceutical compositions to treat disorders associated with null or inadequate expression of the genomic sequence.

[0087] Screening and Purification Assays

[0088] A protein or a portion thereof encoded by the cDNA may be used to screen a library or a plurality of molecules or compounds for a ligand with specific binding affinity or to purify a molecule or compound from a sample. The protein or portion thereof employed in such screening may be free in solution, affixed to an abiotic or biotic substrate, or located intracellularly. For example, viable or fixed prokaryotic host cells that are stably transformed with recombinant nucleic acids that have expressed and positioned a protein on their cell surface can be used in screening assays. The cells are screened against a library or a plurality of ligands and the specificity of binding or formation of complexes between the expressed protein and the ligand may be measured. The ligands may be DNA, RNA, or PNA molecules, agonists, antagonists, antibodies, immunoglobulins, inhibitors, peptides, pharmaceutical agents, proteins, drugs, or any other test molecule or compound that specifically binds the protein. An exemplary assay involves combining the mammalian protein or a portion thereof with the molecules or compounds under conditions that allow specific binding and detecting the bound protein to identify at least one ligand that specifically binds the protein.

[0089] This invention also contemplates the use of competitive drug screening assays in which neutralizing antibodies capable of binding the protein specifically compete with a test compound capable of binding to the protein or oligopeptide or fragment thereof. One method for high throughput screening using very small assay volumes and very small amounts of test compound is described in U.S. Pat. No. 5,876,946. Molecules or compounds identified by screening may be used in a model system to evaluate their toxicity, diagnostic, or therapeutic potential.

[0090] The protein may be used to purify a ligand from a sample. A method for using a protein to purify a ligand would involve combining the protein or a portion thereof with a sample under conditions to allow specific binding, recovering the bound protein, and using an appropriate chaotropic agent to separate the protein from the purified ligand.

[0091] Production of Antibodies

[0092] A protein encoded by a cDNA of the invention may be used to produce specific antibodies.

[0093] Antibodies may be produced using an oligopeptide or a portion of the protein with inherent immunological activity. Methods for producing antibodies include: 1) injecting an animal, usually goats, rabbits, or mice, with the protein, or an antigenically-effective portion or an oligopeptide thereof, to induce an immune response; 2) engineering hybridomas to produce monoclonal antibodies; 3) inducing in vivo production in the lymphocyte population; or 4) screening libraries of recombinant immunoglobulins. Recombinant immunoglobulins may be produced as taught in U.S. Pat. No. 4,816,567.

[0094] Antibodies produced using the proteins of the invention are useful for the diagnosis of prepathologic disorders as well as the diagnosis of chronic or acute diseases characterized by abnormalities in the expression, amount, or distribution of the protein. A variety of protocols for competitive binding or immunoradiometric assays using either polyclonal or monoclonal antibodies specific for proteins are well known in the art. Immunoassays typically involve the formation of complexes between a protein and its specific binding molecule or compound and the measurement of complex for formation. Immunoassays may employ a two-site, monoclonal-based assay that utilizes monoclonal antibodies reactive to two noninterfering epitopes on a specific protein or a competitive binding assay (Pound (1998) Immunochemical Protocols, Humana Press, Totowa N.J.).

[0095] Immunoassay procedures may be used to quantify expression of the protein in cell cultures, in subjects with a particular disorder or in model animal systems under various conditions. Increased or decreased production of proteins as monitored by immunoassay may contribute to knowledge of the cellular activities associated with developmental pathways, engineered conditions or diseases, or treatment efficacy. The quantity of a given protein in a given tissue may be determined by performing immunoassays on freeze-thawed detergent extracts of biological samples and comparing the slope of the binding curves to binding curves generated by purified protein.

[0096] Labeling of Molecules for Assay

[0097] A wide variety of reporter molecules and conjugation techniques are known by those skilled in the art and may be used in various cDNA, polynucleotide, protein, peptide or antibody assays. Synthesis of labeled molecules may be achieved using commercial kits for incorporation of a labeled nucleotide such as ³²P-dCTP, Cy3-dCTP or Cy5-dCTP or amino acid such as ³⁵S-methionine. Polynucleotides, cDNAs, proteins, or antibodies may be directly labeled with a reporter molecule by chemical conjugation to amines, thiols and other groups present in the molecules using reagents such as BIODIPY or FITC (Molecular Probes, Eugene Oreg.).

[0098] The proteins and antibodies may be labeled for purposes of assay by joining them, either covalently or noncovalently, with a reporter molecule that provides for a detectable signal. A wide variety of labels and conjugation techniques are known and have been reported in the scientific and patent literature including, but not limited to, U.S. Pat. Nos. 3,817,837; 3,850,752; 3,939,350; 3,996,345; 4,277,437; 4,275,149; and 4,366,241.

[0099] Diagnostics

[0100] The cDNAs, or fragments thereof, may be used to detect and quantify differential gene expression; absence, presence, or excess expression of mRNAs; or to monitor mRNA levels during therapeutic intervention. Disorders associated with altered expression include atherosclerosis, cancer, coronary artery disease, hypertension, diabetes, preeclempsia, ischemia-reperfusion injury, restenosis, and stroke. These cDNAs can also be utilized as markers of treatment efficacy against the disorders noted above and other disorders, conditions, and diseases over a period ranging from several days to months. The diagnostic assay may use hybridization or amplification technology to compare gene expression in a biological sample from a patient to standard samples in order to detect altered gene expression. Qualitative or quantitative methods for this comparison are well known in the art.

[0101] For example, the cDNA may be labeled by standard methods and added to a biological sample from a patient under conditions for hybridization complex formation. After an incubation period, the sample is washed and the amount of label (or signal) associated with hybridization complexes is quantified and compared with a standard value. If the amount of label in the patient sample is significantly altered in comparison to the standard value, then the presence of the associated condition, disease or disorder is indicated.

[0102] In order to provide a basis for the diagnosis of a condition, disease or disorder associated with gene expression, a normal or standard expression profile is established. This may be accomplished by combining a biological sample taken from normal subjects, either animal or human, with a probe under conditions for hybridization or amplification. Standard hybridization may be quantified by comparing the values obtained using normal subjects with values from an experiment in which a known amount of a substantially purified target sequence is used. Standard values obtained in this manner may be compared with values obtained from samples from patients who are symptomatic for a particular condition, disease, or disorder. Deviation from standard values toward those associated with a particular condition is used to diagnose that condition.

[0103] Such assays may also be used to evaluate the efficacy of a particular therapeutic treatment regimen in animal studies and in clinical trial or to monitor the treatment of an individual patient. Once the presence of a condition is established and a treatment protocol is initiated, diagnostic assays may be repeated on a regular basis to determine if the level of expression in the patient begins to approximate that which is observed in a normal subject. The results obtained from successive assays may be used to show the efficacy of treatment over a period ranging from several days to months.

[0104] Gene Expression Profiles

[0105] A gene expression profile comprises a plurality of cDNAs and a plurality of detectable hybridization complexes, wherein each complex is formed by hybridization of one or more probes to one or more complementary sequences in a sample. The cDNAs of the invention are used as elements on a microarray to analyze gene expression profiles. In one embodiment, the microarray is used to monitor the progression of disease. Researchers can assess and catalog the differences in gene expression between healthy and diseased tissues or cells. By analyzing changes in patterns of gene expression, disease can be diagnosed at earlier stages before the patient is symptomatic. The invention can be used to formulate a prognosis and to design a treatment regimen. The invention can also be used to monitor the efficacy of treatment. For treatments with known side effects, the microarray is employed to improve the treatment regimen. A dosage is established that causes a change in genetic expression patterns indicative of successful treatment. Expression patterns associated with the onset of undesirable side effects are avoided. This approach may be more sensitive and rapid than waiting for the patient to show inadequate improvement, or to manifest side effects, before altering the course of treatment.

[0106] In another embodiment, animal models which mimic a human disease can be used to characterize expression profiles associated with a particular condition, disorder or disease; or treatment of the condition, disorder or disease. Novel treatment regimens may be tested in these animal models using microarrays to establish and then follow expression profiles over time. In addition, microarrays may be used with cell cultures or tissues removed from animal models to rapidly screen large numbers of candidate drug molecules, looking for ones that produce an expression profile similar to those of known therapeutic drugs, with the expectation that molecules with the same expression profile will likely have similar therapeutic effects. Thus, the invention provides the means to rapidly determine the molecular mode of action of a drug.

[0107] Assays Using Antibodies

[0108] Antibodies directed against epitopes on a protein encoded by a cDNA of the invention may be used in assays to quantify the amount of protein found in a particular human cell. Such assays include methods utilizing the antibody and a label to detect expression level under normal or disease conditions. The antibodies may be used with or without modification, and labeled by joining them, either covalently or noncovalently, with a labeling moiety.

[0109] Protocols for detecting and measuring protein expression using either polyclonal or monoclonal antibodies are well known in the art. Examples include ELISA, RIA, and fluorescent activated cell sorting (FACS). Such immunoassays typically involve the formation of complexes between the protein and its specific antibody and the measurement of such complexes. These and other assays are described in Pound (supra). The method may employ a two-site, monoclonal-based immunoassay utilizing monoclonal antibodies reactive to two non-interfering epitopes, or a competitive binding assay. (See, e.g., Coligan et al. (1997) Current Protocols in Immunology, Wiley-Interscience, New York N.Y.; Pound, supra)

[0110] Therapeutics

[0111] The cDNAs and fragments thereof can be used in gene therapy. cDNAs can be delivered ex vivo to target cells, such as cells of bone marrow. Once stable integration and transcription and or translation are confirmed, the bone marrow may be reintroduced into the subject. Expression of the protein encoded by the cDNA may correct a disorder associated with mutation of a normal sequence, reduction or loss of an endogenous target protein, or overepression of an endogenous or mutant protein. Alternatively, cDNAs may be delivered in vivo using vectors such as retrovirus, adenovirus, adeno-associated virus, herpes simplex virus, and bacterial plasmids. Non-viral methods of gene delivery include cationic liposomes, polylysine conjugates, artificial viral envelopes, and direct injection of DNA (Anderson (1998) Nature 392:25-30; Dachs et al. (1997) Oncol Res 9:313-325; Chu et al. (1998) J Mol Med 76(3-4):184-192; Weiss et al. (1999) Cell Mol Life Sci 55(3):334-358; Agrawal (1996) Antisense Therapeutics, Humana Press, Totowa N.J.; and August et al. (1997) Gene Therapy (Advances in Pharmacology. Vol. 40), Academic Press, San Diego Calif.).

[0112] In addition, expression of a particular protein can be regulated through the specific binding of a fragment of a cDNA to a genomic sequence or an mRNA which encodes the protein or directs its transcription or translation. The cDNA can be modified or derivatized to any RNA-like or DNA-like material including peptide nucleic acids, branched nucleic acids, and the like. These sequences can be produced biologically by transforming an appropriate host cell with a vector containing the sequence of interest.

[0113] Molecules which regulate the activity of the cDNA or encoded protein are useful as therapeutics for atherosclerosis, coronary artery disease, and cerebral stroke. Such molecules include agonists which increase the expression or activity of the polynucleotide or encoded protein, respectively; or antagonists which decrease expression or activity of the polynucleotide or encoded protein, respectively. In one aspect, an antibody which specifically binds the protein may be used directly as an antagonist or indirectly as a delivery mechanism for bringing a pharmaceutical agent to cells or tissues which express the protein.

[0114] Additionally, any of the proteins, or their ligands, or complementary nucleic acid sequences may be administered as pharmaceutical compositions or in combination with other appropriate therapeutic agents. Selection of the appropriate agents for use in combination therapy may be made by one of ordinary skill in the art, according to conventional pharmaceutical principles. The combination of therapeutic agents may act synergistically to affect the treatment or prevention of the conditions and disorders associated with an immune response. Using this approach, one may be able to achieve therapeutic efficacy with lower dosages of each agent, thus reducing the potential for adverse side effects. Further, the therapeutic agents may be combined with pharmaceutically-acceptable carriers including excipients and auxiliaries which facilitate processing of the active compounds into preparations which can be used pharmaceutically. Further details on techniques for formulation and administration used by doctors and pharmacists may be found in the latest edition of Remington's Pharmaceutical Sciences (Mack Publishing, Easton Pa.).

[0115] Model Systems

[0116] Animal models may be used as bioassays where they exhibit a phenotypic response similar to that of humans and where exposure conditions are relevant to human exposures. Mammals are the most common models, and most infectious agent, cancer, drug, and toxicity studies are performed on rodents such as rats or mice because of low cost, availability, lifespan, reproductive potential, and abundant reference literature. Inbred and outbred rodent strains provide a convenient model for investigation of the physiological consequences of underexpression or overexpression of genes of interest and for the development of methods for diagnosis and treatment of diseases. A mammal inbred to overexpress a particular gene (for example, secreted in milk) may also serve as a convenient source of the protein expressed by that gene.

[0117] Transgenic Animal Models

[0118] Transgenic rodents that overexpress or underexpress a gene of interest may be inbred and used to model human diseases or to test therapeutic or toxic agents. (See, e.g., U.S. Pat. No. 5,175,383 and U.S. Pat. No. 5,767,337.) In some cases, the introduced gene may be activated at a specific time in a specific tissue type during fetal or postnatal development. Expression of the transgene is monitored by analysis of phenotype, of tissue-specific mRNA expression, or of serum and tissue protein levels in transgenic animals before, during, and after challenge with experimental drug therapies.

[0119] Embryonic Stem Cells

[0120] Embryonic (ES) stem cells isolated from rodent embryos retain the potential to form embryonic tissues. When ES cells such as the mouse 129/SvJ cell line are placed in a blastocyst from the C57BL/6 mouse strain, they resume normal development and contribute to tissues of the live-born animal. ES cells are preferred for use in the creation of experimental knockout and knockin animals. The method for this process is well known in the art and the steps are: the cDNA is introduced into a vector, the vector is transformed into ES cells, transformed cells are identified and microinjected into mouse cell blastocysts, blastocysts are surgically transferred to pseudopregnant dams. The resulting chimeric progeny are genotyped and bred to produce heterozygous or homozygous strains.

[0121] Knockout Analysis

[0122] In gene knockout analysis, a region of a gene is enzymatically modified to include a non-natural intervening sequence such as the neomycin phosphotransferase gene (neo; Capecchi (1989) Science 30 244:1288-1292). The modified gene is transformed into cultured ES cells and integrates into the endogenous genome by homologous recombination. The inserted sequence disrupts transcription and translation of the endogenous gene.

[0123] Knockin Analysis

[0124] ES cells can be used to create knockin humanized animals or transgenic animal models of human diseases. With knockin technology, a region of a human gene is injected into animal ES cells, and the human sequence integrates into the animal cell genome. Transgenic progeny or inbred lines are studied and treated with potential pharmaceutical agents to obtain information on the progression and treatment of the analogous human condition.

[0125] As described herein, the uses of the cDNAs, provided in the Sequence Listing of this application, and their encoded proteins are exemplary of known techniques and are not intended to reflect any limitation on their use in any technique that would be known to the person of average skill in the art. Furthermore, the cDNAs provided in this application may be used in molecular biology techniques that have not yet been developed, provided the new techniques rely on properties of nucleotide sequences that are currently known to the person of ordinary skill in the art, e.g., the triplet genetic code, specific base pair interactions, and the like. Likewise, reference to a method may include combining more than one method for obtaining or assembling full length cDNA sequences that will be known to those skilled in the art. It is also to be understood that this invention is not limited to the particular methodology, protocols, and reagents described, as these may vary. It is also understood that the terminology used herein is for the purpose of describing particular embodiments only, and is not intended to limit the scope of the present invention which will be limited only by the appended claims. The examples below are provided to illustrate the subject invention and are not included for the purpose of limiting the invention.

### EXAMPLES

[0126] I Construction of cDNA Libraries

[0127] RNA was purchased from Clontech Laboratories (Palo Alto Calif.) or isolated from various tissues. Some tissues were homogenized and lysed in guanidinium isothiocyanate, while others were homogenized and lysed in phenol or in a suitable mixture of denaturants, such as TRIZOL reagent (Invitrogen). The resulting lysates were centrifuged over CsCl cushions or extracted with chloroform. RNA was precipitated with either isopropanol or ethanol and sodium acetate, or by other routine methods.

[0128] Phenol extraction and precipitation of RNA were repeated as necessary to increase RNA purity. In most cases, RNA was treated with DNAse. For most libraries, poly(A) RNA was isolated using oligo d(T)-coupled paramagnetic particles (Promega), OLIGOTEX latex particles (Qiagen, Valencia Calif.), or an OLIGOTEX mRNA purification kit (Qiagen). Alternatively, poly(A) RNA was isolated directly from tissue lysates using other kits, including the POLY(A)PURE mRNA purification kit (Ambion, Austin Tex.).

[0129] In some cases, Stratagene (La Jolla Calif.) was provided with RNA and constructed the corresponding cDNA libraries. Otherwise, cDNA was synthesized and cDNA libraries were constructed with the UNIZAP vector system (Stratagene) or SUPERSCRIPT plasmid system (Invitrogen) using the recommended procedures or similar methods known in the art. (See Ausubel, supra, Units 5.1 through 6.6.) Reverse transcription was initiated using oligo d(T) or random primers. Synthetic oligonucleotide adapters were ligated to double stranded cDNA, and the cDNA was digested with the appropriate restriction enzyme or enzymes. For most libraries, the cDNA was size-selected (300-1000 bp) using SEPHACRYL S1000, SEPHAROSE CL2B, or SEPHAROSE CL4B column chromatography (APB) or preparative agarose gel electrophoresis. cDNAs were ligated into compatible restriction enzyme sites of the polylinker of the pBLUESCRIPT phagemid (Stratagene), pSPORT1 plasmid (Invitrogen), or pINCY plasmid (Incyte Genomics). Recombinant plasmids were transformed into XL1-BLUE, XL1-BLUEMRF, or SOLR competent E. coli cells (Stratagene) or DH5α, DH10B, or ELECTROMAX DH10B competent E. coli cells (Invitrogen).

[0130] In some cases, libraries were superinfected with a 5× excess of the helper phage, M13K07, according to the method of Vieira et al. (1987, Methods Enzymol. 153:3-11) and normalized or subtracted using a methodology adapted from Soares (1994, Proc Natl Acad Sci 91:9228-9232), Swaroop et al. (1991, Nucl Acids Res 19:1954), and Bonaldo et al. (1996, Genome Research 6:791-806). The modified Soares normalization procedure was utilized to reduce the repetitive cloning of highly expressed high abundance cDNAs while maintaining the overall sequence complexity of the library. Modification included significantly longer hybridization times which allowed for increased gene discovery rates by biasing the normalized libraries toward those infrequently expressed low-abundance cDNAs which are poorly represented in a standard transcript image (Soares et al., supra).

[0131] II Isolation and Sequencing of cDNA Clones

[0132] Plasmids were recovered from host cells by in vivo excision using the UNIZAP vector system (Stratagene) or by cell lysis. Plasmids were purified using one of the following: the Magic or WIZARD MINIPREPS DNA purification system (Promega); the AGTC MINIPREP purification kit (Edge BioSystems, Gaithersburg Md.); the QIAWELL 8, QIAWELL 8 Plus, or QIAWELL 8 Ultra plasmid purification systems, or the REAL PREP 96 plasmid purification kit (Qiagen). Following precipitation, plasmids were resuspended in 0.1 ml of distilled water and stored, with or without lyophilization, at 4° C.

[0133] Alternatively, plasmid DNA was amplified from host cell lysates using direct link PCR in a high-throughput format (Rao (1994) Anal Biochem 216:1-14). Host cell lysis and thermal cycling steps were carried out in a single reaction mixture. Samples were processed and stored in 384-well plates, and the concentration of amplified plasmid DNA was quantified fluorometrically using PICOGREEN dye (Molecular Probes) and a FLUOROSKAN II fluorescence scanner (Labsystems Oy, Helsinki, Finland).

[0134] cDNA sequencing reactions were processed using standard methods or high-throughput instrumentation such as the ABI CATALYST 800 thermal cycler (ABI) or the DNA ENGINE thermal cycler (MJ Research, Watertown Mass.) in conjunction with the HYDRA microdispenser (Robbins Scientific, Sunnyvale Calif.) or the MICROLAB 2200 system (Hamilton, Reno Nev.). cDNA sequencing reactions were prepared using reagents provided by APB or supplied in ABI sequencing kits such as the ABI PRISM BIGDYE cycle sequencing kit (ABI). Electrophoretic separation of cDNA sequencing reactions and detection of labeled cDNAs were carried out using the MEGABACE 1000 DNA sequencing system (APB); the ABI PRISM 373 or 377 sequencing systems (ABI) in conjunction with standard ABI protocols and base calling software; or other sequence analysis systems known in the art. Reading frames within the cDNA sequences were identified using standard methods (reviewed in Ausubel, supra, Unit 7.7).

[0135] III Extension of cDNA Sequences

[0136] Nucleic acid sequences were extended using the cDNA clones and oligonucleotide primers. One primer was synthesized to initiate 5′ extension of the known fragment, and the other, to initiate 3′ extension of the known fragment. The initial primers were designed using OLIGO primer analysis software (Molecular Biology Insights, Cascade Colo.), or another appropriate program, to be about 22 to 30 nucleotides in length, to have a GC content of about 50% or more, and to anneal to the target sequence at temperatures of about 68° C. to about 72° C. Any stretch of nucleotides which would result in hairpin structures and primer-primer dimerizations was avoided.

[0137] Selected human cDNA libraries were used to extend the sequence. If more than one extension was necessary or desired, additional or nested sets of primers were designed. Preferred libraries are ones that have been size-selected to include larger cDNAs. Also, random primed libraries are preferred because they will contain more sequences with the 5′ and upstream regions of genes. A randomly primed library is particularly useful if an oligo d(T) library does not yield a full-length cDNA.

[0138] High fidelity amplification was obtained by PCR using methods well known in the art. PCR was performed in 96-well plates using the DNA ENGINE thermal cycler (MJ Research). The reaction mix contained DNA template, 200 nmol of each primer, reaction buffer containing Mg²⁺, (NH₄)₂SO₄, and β-mercaptoethanol, Taq DNA polymerase (APB), ELONGASE enzyme (Invitrogen), and Pfu DNA polymerase (Stratagene), with the following parameters for primer pair PCI A and PCI B (Incyte Genomics): Step 1: 94° C., 3 min; Step 2: 94° C., 15 sec; Step 3: 60° C., 1 min; Step 4: 68° C., 2 min; Step 5: Step 5: Steps 2, 3, and 4 repeated 20 times; Step 6: 68° C., 5 min; Step 7: storage at 4° C. In the alternative, the primer pair T7 and SK+ (Stratagene) were as follows: Step 1: 94° C., 3 min; Step 2: 94° C., 15 sec; Step 3: 57° C., 1 min; Step 4: 68° C., 2 min; Step 5: Steps 2, 3, and 4 repeated 20 times; Step 6: 68° C., 5 min; Step 7: storage at 4° C.

[0139] The concentration of DNA in each well was determined by dispensing 100 μl PICOGREEN reagent (0.25% reagent in 1× TE, v/v; Molecular Probes) and 0.5 μl of undiluted PCR product into each well of an opaque fluorimeter plate (Corning Costar, Acton Mass.) and allowing the DNA to bind to the reagent. The plate was scanned in a FLUOROSKAN II (Labsystems Oy) to measure the fluorescence of the sample and to quantify the concentration of DNA. A 5 μl to 10 μl aliquot of the reaction mixture was analyzed by electrophoresis on a 1% agarose mini-gel to determine which reactions were successful in extending the sequence.

[0140] The extended nucleic acids were desalted and concentrated, transferred to 384-well plates, digested with CviJI cholera virus endonuclease (Molecular Biology Research, Madison Wis.), and sonicated or sheared prior to religation into pUC18 vector (APB). For shotgun sequencing, the digested nucleic acids were separated on low concentration (0.6 to 0.8%) agarose gels, fragments were excised, and agar digested with AGARACE enzyme (Promega). Extended clones were religated using T4 DNA ligase (New England Biolabs, Beverly Mass.) into pUC18 vector (APB), treated with Pfu DNA polymerase (Stratagene) to fill-in restriction site overhangs, and transformed into competent E. coli cells. Transformed cells were selected on antibiotic-containing media, and individual colonies were picked and cultured overnight at 37° C. in 384-well plates in LB/2× carbenicillin liquid media.

[0141] The cells were lysed, and DNA was amplified by PCR using Taq DNA polymerase (APB) and Pfu DNA polymerase (Stratagene) with the following parameters: Step 1: 94° C., 3 min; Step 2: 94° C., 15 sec;

[0142] Step 3: 60° C., 1 min; Step 4: 72° C., 2 min; Step 5: steps 2, 3, and 4 repeated 29 times; Step 6: 72° C., 5 min; Step 7: storage at 4° C. DNA was quantified using PICOGREEN reagent (Molecular Probes) as described above. Samples with low DNA recoveries were reamplified using the same conditions described above. Samples were diluted with 20% dimethylsulfoxide (1:2, v/v), and sequenced using DYENAMIC energy transfer sequencing primers and the DYENAMIC DIRECT cycle sequencing kit (APB) or the ABI PRISM BIGDYE terminator cycle sequencing kit (ABI).

[0143] IV Assembly and Analysis of Sequences

[0144] Component nucleotide sequences from chromatograms were subjected to PHRED analysis (Phil Green, University of Washington, Seattle Wash.) and assigned a quality score. The sequences having at least a required quality score were subject to various pre-processing algorithms to eliminate low quality 3′ ends, vector and linker sequences, polyA tails, Alu repeats, mitochondrial and ribosomal sequences, bacterial contamination sequences, and sequences smaller than 50 base pairs. Sequences were screened using the BLOCK 2 program (Incyte Genomics), a motif analysis program based on sequence information contained in the SWISS-PROT and PROSITE databases (Bairoch et al. (1997) Nucleic Acids Res 25:217-221; Attwood et al. (1997) J Chem Inf Comput Sci 37:417-424).

[0145] Processed sequences were subjected to assembly procedures in which the sequences were assigned to bins, one sequence per bin. Sequences in each bin were assembled to produce consensus sequences, templates. Subsequent new sequences were added to existing bins using BLAST (Altschul (supra); Altschul et al. (supra); Karlin et al. (1988) Proc Natl Acad Sci 85:841-845), BLASTn (vers.1.4, WashU), and CROSSMATCH software (Phil Green, supra). Candidate pairs were identified as all BLAST hits having a quality score greater than or equal to 150. Alignments of at least 82% local identity were accepted into the bin. The component sequences from each bin were assembled using PHRAP (Phil Green, supra). Bins with several overlapping component sequences were assembled using DEEP PHRAP (Phil Green, supra).

[0146] Bins were compared against each other, and those having local similarity of at least 82% were combined and reassembled. Reassembled bins having templates of insufficient overlap (less than 95% local identity) were re-split. Assembled templates were also subjected to analysis by STITCHER/EXON MAPPER algorithms which analyzed the probabilities of the presence of splice variants, alternatively spliced exons, splice junctions, differential expression of alternative spliced genes across tissue types, disease states, and the like. These resulting bins were subjected to several rounds of the above assembly procedures to generate the template sequences found in the LIFESEQ GOLD database (Incyte Genomics).

[0147] The assembled templates were annotated using the following procedure. Template sequences were analyzed using BLASTn (vers. 2.0, NCBI) versus GBpri (GenBank vers. 120). “Hits” were defined as an exact match having from 95% local identity over 200 base pairs through 100% local identity over 100 base pairs, or a homolog match having an E-value equal to or greater than 1×10^{31 8}. (The “E-value” quantifies the statistical probability that a match between two sequences occurred by chance). The hits were subjected to frameshift FASTx versus GENPEPT (GenBank version 109). In this analysis, a homolog match was defined as having an E-value of 1×10⁻. The assembly method used above was described in U.S. Ser. No. 09/276,534, filed Mar. 25, 1999, and the LIFESEQ GOLD user manual (Incyte Genomics).

[0148] Following assembly, template sequences were subjected to motif, BLAST, Hidden Markov Model (HMM; Pearson and Lipman (1988) Proc Natl Acad Sci 85:2444-2448; Smith and Waterman, supra), and functional analyses, and categorized in protein hierarchies using methods described in U.S. Ser. No. 08/812,290, filed Mar. 6, 1997; U.S. Ser. No. 08/947,845, filed Oct. 9, 1997; U.S. Pat. No. 5,953,727; and U.S. Ser. No. 09/034,807, filed Mar. 4, 1998. Template sequences may be further queried against public databases such as the GenBank rodent, mammalian, vertebrate, eukaryote, prokaryote, and human EST databases.

[0149] V Selection of Sequences, Microarray Preparation and Use

[0150] Incyte clones represent template sequences derived from the LIFESEQ GOLD assembled human 25 sequence database (Incyte Genomics). In cases where more than one clone was available for a particular template, the 5′-most clone in the template was used on the microarray. The GENEALBUM GEM series 1-6 microarrays (Incyte Genomics) contain 52,616 array elements which represent 17,472 annotated clusters and 35,144 unannotated clusters. The LIFEGEM 1 microarray (Incyte Genomics) contains 6,820 array elements which represent 4,349 annotated clusters and 2,471 unannotated clusters. The LIFEGEM 2 (Incyte Genomics) microarray contains 8,573 array elements which represent 2,955 annotated clusters and 5,618 unannotated clusters. The UNIGEM 1 microarray (Incyte Genomics) contains IMAGE clones that correspond to 4,499 annotated UniGene clusters (Unigene database (build 46), NCBI; Shuler (1997) J Mol Med 75:694-698). For the UNIGEM V microarray (Incyte Genomics), Incyte clones were mapped to non-redundant Unigene clusters, and the 5′ clone with the strongest BLAST alignment (at least 90% identity and 100 bp overlap) was chosen, verified, and used in the construction of the microarray. The UNIGEM V microarray contains 7,075 array elements which represent 4,610 annotated genes and 2,184 unannotated clusters.

[0151] To construct microarrays, cDNAs were amplified from bacterial cells using primers complementary to vector sequences flanking the cDNA insert. Thirty cycles of PCR increased the initial quantity of cDNAs from 1-2 ng to a final quantity greater than 5 μg. Amplified cDNAs were then purified using SEPHACRYL-400 columns (APB). Purified cDNAs were immobilized on polymer-coated glass slides. Glass microscope slides (Corning, Corning N.Y.) were cleaned by ultrasound in 0.1% SDS and acetone, with extensive distilled water washes between and after treatments. Glass slides were etched in 4% hydrofluoric acid (VWR Scientific Products, West Chester Pa.), washed thoroughly in distilled water, and coated with 0.05% aminopropyl silane (Sigma Aldrich) in 95% ethanol. Coated slides were cured in a 110° C. oven. cDNAs were applied to the coated glass substrate using a procedure described in U.S. Pat. No. 5,807,522. One microliter of the cDNA at an average concentration of 100 ng/ul was loaded into the open capillary printing element by a high-speed robotic apparatus which then deposited about 5 nl of cDNA per slide.

[0152] Microarrays were UV-crosslinked using a STRATALINKER UV-crosslinker (Stratagene), and then washed at room temperature once in 0.2% SDS and three times in distilled water. Non-specific binding sites were blocked by incubation of microarrays in 0.2% casein in phosphate buffered saline (Tropix, Bedford Mass.) for 30 minutes at 60° C. followed by washes in 0.2% SDS and distilled water as before.

[0153] VI Preparation of Samples

[0154] Cytokine treatment of cells

[0155] Human coronary artery endothelial cells and human coronary artery smooth muscle cells (BioWhittaker, San Diego Calif.) obtained from the same donor were cultured in tissue culture flasks (Corning Costar) in Endothelium Growth Medium (EGM) or Smooth Muscle Growth Medium (SmGM), respectively (BioWhittaker). Cultures at 85% confluence were either treated with recombinant human TNFα and IL-1β (R&D Systems, Minneapolis Min.) at 10 ng/ml each for 24 hours at 37° C. or were left untreated.

[0156] Isolation and Labeling of Sample cDNAs

[0157] Cells were harvested and lysed in 1 ml of TRIZOL reagent (5×10⁶ cells/ml; Invitrogen). The lysates were vortexed thoroughly and incubated at room temperature for 2-3 minutes and extracted with 0.5 ml chloroform. The extract was mixed, incubated at room temperature for 5 minutes, and centrifuged at 16,000×g for 15 minutes at 4° C. The aqueous layer was collected and an equal volume of isopropanol was added. Samples were mixed, incubated at room temperature for 10 minutes, and centrifuged at 16,000×g for 20 minutes at 4° C. The supernatant was removed and the RNA pellet was washed with 1 ml of 70% ethanol, centrifuged at 16,000×g at 4° C., and resuspended in RNAse-free water. The concentration of the RNA was determined by measuring the optical density at 260 nm.

[0158] Poly(A) RNA was prepared using an OLIGOTEX mRNA kit (QIAGEN) with the following modifications: OLIGOTEX beads were washed in tubes instead of on spin columns, resuspended in elution buffer, and then loaded onto spin columns to recover mRNA. To obtain maximum yield, the mRNA was eluted twice.

[0159] Each poly(A) RNA sample was reverse transcribed using MMLV reverse-transcriptase, 0.05 pg/μl oligo-d(T) primer (21mer), 1× first strand buffer, 0.03 units/ul RNAse inhibitor, 500 uM dATP, 500 uM dGTP, 500 uM dTTP, 40 uM dCTP, and 40 uM either dCTP-Cy3 or dCTP-Cy5 (APB). The reverse transcription reaction was performed in a 25 ml volume containing 200 ng poly(A) RNA using the GEMBRIGHT kit (Incyte Genomics). Specific control poly(A) RNAs (YCFR06, YCFR45, YCFR67, YCFR85, YCFR43, YCFR22, YCFR23, YCFR25, YCFR44, YCFR26) were synthesized by in vitro transcription from non-coding yeast genomic DNA (W. Lei, unpublished). As quantitative controls, control mRNAs (YCFR06, YCFR45, YCFR67, and YCFR85) at 0.002ng, 0.02ng, 0.2 ng, and 2ng were diluted into reverse transcription reaction at ratios of 1:100,000, 1:10,000, 1:1000, 1:100 (w/w) to sample mRNA, respectively. To sample differential expression patterns, control mRNAs (YCFR43, YCFR22, YCFR23, YCFR25, YCFR44, YCFR26) were diluted into reverse transcription reaction at ratios of 1:3, 3:1, 1:10, 10:1, 1:25, 25:1 (w/w) to sample mRNA. Reactions were incubated at 37° C. for 2 hr, treated with 2.5 ml of 0.5M sodium hydroxide, and incubated for 20 minutes at 85° C. to the stop the reaction and degrade the RNA.

[0160] cDNAs were purified using two successive CHROMA SPIN 30 gel filtration spin columns (Clontech). Cy3- and Cy5-labeled reaction samples were combined as described below and ethanol precipitated using 1 ml of glycogen (1 mg/ml), 60 ml sodium acetate, and 300 ml of 100% ethanol. The cDNAs were then dried to completion using a SpeedVAC system (Savant Instruments, Holbrook N.Y.) and resuspended in 14 μl 5×SSC, 0.2% SDS.

[0161] VII Hybridization and Detection

[0162] Hybridization reactions contained 9 μl of sample mixture containing 0.2 μg each of Cy3 and Cy5 labeled cDNA synthesis products in 5×SSC, 0.2% SDS hybridization buffer. The mixture was heated to 65° C. for 5 minutes and was aliquoted onto the microarray surface and covered with an 1.8 cm² coverslip. The microarrays were transferred to a waterproof chamber having a cavity just slightly larger than a microscope slide. The chamber was kept at 100% humidity internally by the addition of 140 μl of 5×SSC in a corner of the chamber. The chamber containing the microarrays was incubated for about 6.5 hours at 60° C. The microarrays were washed for 10 min at 45° C. in low stringency wash buffer (1×SSC, 0.1% SDS), three times for 10 minutes each at 45° C. in high stringency wash buffer (0.1×SSC), and dried.

[0163] Reporter-labeled hybridization complexes were detected with a microscope equipped with an Innova 70 mixed gas 10 W laser (Coherent, Santa Clara Calif.) capable of generating spectral lines at 488 nm for excitation of Cy3 and at 632 nm for excitation of Cy5. The excitation laser light was focused on the microarray using a 20× microscope objective (Nikon, Melville N.Y.). The slide containing the microarray was placed on a computer-controlled X-Y stage on the microscope and raster-scanned past the objective. The 1.8 cm×1.8 cm microarray used in the present example was scanned with a resolution of 20 micrometers.

[0164] In two separate scans, the mixed gas multiline laser excited the two fluorophores sequentially. Emitted light was split, based on wavelength, into two photomultiplier tube detectors (PMT R1477; Hamamatsu Photonics Systems, Bridgewater N.J.) corresponding to the two fluorophores. Appropriate filters positioned between the microarray and the photomultiplier tubes were used to filter the signals. The emission maxima of the fluorophores used were 565 nm for Cy3 and 650 nm for Cy5. Each microarray was typically scanned twice, one scan per fluorophore using the appropriate filters at the laser source, although the apparatus was capable of recording the spectra from both fluorophores simultaneously.

[0165] The sensitivity of the scans was calibrated using the signal intensity generated by a cDNA control species. Samples of the calibrating cDNA were separately labeled with the two fluorophores and identical amounts of each were added to the hybridization mixture. A specific location on the microarray contained a complementary DNA sequence, allowing the intensity of the signal at that location to be correlated with a weight ratio of hybridizing species of 1:100,000.

[0166] The output of the photomultiplier tube was digitized using a 12-bit RTI-835H analog-to-digital (A/D) conversion board (Analog Devices, Norwood, Mass.) installed in an IBM-compatible PC computer. The digitized data were displayed as an image where the signal intensity was mapped using a linear 20-color transformation to a pseudocolor scale ranging from blue (low signal) to red (high signal). The data was also analyzed quantitatively. Where two different fluorophores were excited and measured simultaneously, the data were first corrected for optical crosstalk (due to overlapping emission spectra) between the fluorophores using each fluorophore's emission spectrum.

[0167] A grid was superimposed over the fluorescence signal image such that the signal from each spot was centered in each element of the grid. The fluorescence signal within each element was then integrated to obtain a numerical value corresponding to the average intensity of the signal. The software used for signal analysis was the GEMTOOLS gene expression analysis program (Incyte Genomics). Significance was defined as signal to background ratio exceeding 2× and area hybridization exceeding 40%.

[0168] VIII Data Analysis and Results

[0169] Array elements that exhibited at least 2.5-fold change in expression in at least one experimental condition, a signal intensity over 250 units, a signal-to-background ratio of at least 2.5, and an element spot size of at least 40% were identified as differentially expressed using the GEMTOOLS program (Incyte Genomics). Differential expression values were converted to log base 2 scale. The cDNAs that are differentially expressed are shown in Table 1. The cDNAs are identified by their SEQ ID NO, TEMPLATE ID, Clone ID, and by the description associated with at least a fragment of a polynucleotide found in GenBank. The descriptions were obtained using the sequences of the Sequence Listing and BLAST analysis. Several templates were represented by more than one clone in the experiment and appear in Table 1 more than once.

[0170] IX Further Characterization of Differentially Expressed cDNAs and Proteins

[0171] Clones were blasted against the LIFESEQ Gold 5.1 database (Incyte Genomics) and an Incyte template and its sequence variants were chosen for each clone. The template and variant sequences were blasted against GenBank database to acquire annotation. The nucleotide sequences were translated into amino acid sequences which were blasted against the GenPept and other protein databases to acquire annotation and characterization, i.e., structural motifs. Different templates identified in Table 1 may share an identical GenBank annotation. These templates represent related homologs or splice variants. Templates with no match to a sequence in the GenBank database are identified in Table 1 as “Incyte Unique.”

[0172] Percent sequence identity can be determined electronically for two or more amino acid or nucleic acid sequences using the MEGALIGN program, a component of LASERGENE software (DNASTAR). The percent identity between two amino acid sequences is calculated by dividing the length of sequence A, minus the number of gap residues in sequence A, minus the number of gap residues in sequence B, into the sum of the residue matches between sequence A and sequence B, times one hundred. Gaps of low or of no homology between the two amino acid sequences are not included in determining percentage identity.

[0173] Sequences with conserved protein motifs may be searched using the BLOCKS search program. This program analyses sequence information contained in the Swiss-Prot and PROSITE databases and is useful for determining the classification of uncharacterized proteins translated from genomic or cDNA sequences (Bairoch et al. supra); Attwood et al. (supra)). PROSITE database is a useful source for identifying functional or structural domains that are not detected using motifs due to extreme sequence divergence. Using weight matrices, these domains are calibrated against the SWISS-PROT database to obtain a measure of the chance distribution of the matches.

[0174] The PRINTS database can be searched using the BLIMPS search program to obtain protein family “fingerprints”. The PRINTS database complements the PROSITE database by exploiting groups of conserved motifs within sequence alignments to build characteristic signatures of different protein families. For both BLOCKS and PRINTS analyses, the cutoff scores for local similarity were: >1300=strong, 1000-1 300=suggestive; for global similarity were: p<exp-3; and for strength (degree of correlation) were: >1300=strong, 1000-1300=weak. Pfam is a large collection of multiple sequence alignments and hidden Markov models covering many common protein domains. Version 5.5 of Pfam (September 2000) contains alignments and models for 2478 protein families, based on the Swissprot 38 and SP-TrEMBL 11 protein sequence databases.

[0175] X Other Hybridization Technologies and Analyses

[0176] Other hybridization technologies utilize a variety of substrates such as nylon membranes, capillary tubes, etc. Arranging cDNAs on polymer coated slides is described in Example V; sample cDNA preparation and hybridization and analysis using polymer coated slides is described in examples VI and VII, respectively.

[0177] The cDNAs are applied to a membrane substrate by one of the following methods. A mixture of cDNAs is fractionated by gel electrophoresis and transferred to a nylon membrane by capillary transfer. Alternatively, the cDNAs are individually ligated to a vector and inserted into bacterial host cells to form a library. The cDNAs are then arranged on a substrate by one of the following methods. In the first method, bacterial cells containing individual clones are robotically picked and arranged on a nylon membrane. The membrane is placed on LB agar containing selective agent (carbenicillin, kanamycin, ampicillin, or chloramphenicol depending on the vector used) and incubated at 37° C. for 16 hr. The membrane is removed from the agar and consecutively placed colony side up in 10% SDS, denaturing solution (1.5 M NaCl, 0.5 M NaOH), neutralizing solution (1.5 M NaCl, 1 M Tris, pH 8.0), and twice in 2×SSC for 10 min each. The membrane is then UV irradiated in a STRATALINKER UV-crosslinker (Stratagene).

[0178] In the second method, cDNAs are amplified from bacterial vectors by thirty cycles of PCR using primers complementary to vector sequences flanking the insert. PCR amplification increases a starting concentration of 1-2 ng nucleic acid to a final quantity greater than 5 μg. Amplified nucleic acids from about 400 bp to about 5000 bp in length are purified using SEPHACRYL-400 beads (APB). Purified nucleic acids are arranged on a nylon membrane manually or using a dot/slot blotting manifold and suction device and are immobilized by denaturation, neutralization, and UV irradiation as described above.

[0179] Hybridization probes derived from cDNAs of the Sequence Listing are employed for screening cDNAs, mRNAs, or genomic DNA in membrane-based hybridizations. Probes are prepared by diluting the cDNAs to a concentration of 40-50 ng in 45 μl TE buffer, denaturing by heating to 100° C. for five min and briefly centrifuging. The denatured cDNA is then added to a REDIPRIME tube (APB), gently mixed until blue color is evenly distributed, and briefly centrifuged. Five microliters of [³²P]dCTP is added to the tube, and the contents are incubated at 37° C. for 10 min. The labeling reaction is stopped by adding 5 μl of 0.2M EDTA, and probe is purified from unincorporated nucleotides using a PROBEQUANT G-50 microcolumn (APB). The purified probe is heated to 100°C. for five min and then snap cooled for two min on ice.

[0180] Membranes are pre-hybridized in hybridization solution containing 1% Sarkosyl and 1× high phosphate buffer (0.5 M NaCl, 0.1 M Na₂HPO₄, 5 mM EDTA, pH 7) at 55° C. for two hr. The probe, diluted in 15 ml fresh hybridization solution, is then added to the membrane. The membrane is hybridized with the probe at 55° C. for 16 hr. Following hybridization, the membrane is washed for 15 min at 25° C. in 1mM Tris (pH 8.0), 1% Sarkosyl, and four times for 15 min each at 25° C. in 1 mM Tris (pH 8.0). To detect hybridization complexes, XOMAT-AR film (Eastman Kodak, Rochester N.Y.) is exposed to the membrane overnight at −70° C., developed, and examined.

[0181] XI Expression of the Encoded Protein

[0182] Expression and purification of a protein encoded by a cDNA of the invention is achieved using bacterial or virus-based expression systems. For expression in bacteria, cDNA is subcloned into a vector containing an antibiotic resistance gene and an inducible promoter that directs high levels of cDNA transcription. Examples of such promoters include, but are not limited to, the trp-lac (tac) hybrid promoter and the T5 or T7 bacteriophage promoter in conjunction with the lac operator regulatory element. Recombinant vectors are transformed into bacterial hosts, such as BL21(DE3). Antibiotic resistant bacteria express the protein upon induction with IPTG. Expression in eukaryotic cells is achieved by infecting Spodoptera frugiperda (Sf9) insect cells with recombinant baculovirus, Autographica californica nuclear polyhedrosis virus. The polyhedrin gene of baculovirus is replaced with the cDNA by either homologous recombination or bacterial-mediated transposition involving transfer plasmid intermediates. Viral infectivity is maintained and the strong polyhedrin promoter drives high levels of transcription.

[0183] For ease of purification, the protein is synthesized as a fusion protein with glutathione-S-transferase (GST; APB) or a similar alternative such as FLAG. The fusion protein is purified on immobilized glutathione under conditions that maintain protein activity and antigenicity. After purification, the GST moiety is proteolytically cleaved from the protein with thrombin. A fusion protein with FLAG, an 8-amino acid peptide, is purified using commercially available monoclonal and polyclonal anti-FLAG antibodies (Eastman Kodak, Rochester N.Y.).

[0184] XII Production of Specific Antibodies

[0185] A denatured protein from a reverse phase HPLC separation is obtained in quantities up to 75 mg. This denatured protein is used to immunize mice or rabbits following standard protocols. About 100 μg is used to immunize a mouse, while up to 1 mg is used to immunize a rabbit. The denatured protein is radioiodinated and incubated with murine B-cell hybridomas to screen for monoclonal antibodies. About 20 mg of protein is sufficient for labeling and screening several thousand clones.

[0186] In another approach, the amino acid sequence translated from a cDNA of the invention is analyzed using PROTEAN software (DNASTAR) to determine regions of high antigenicity, essentially antigenically-effective epitopes of the protein. The optimal sequences for immunization are usually at the C-terminus, the N-terminus, and those intervening, hydrophilic regions of the protein that are likely to be exposed to the external environment when the protein is in its natural conformation. Typically, oligopeptides about 15 residues in length are synthesized using an ABI 431 peptide synthesizer (ABI) using Fmoc-chemistry and then coupled to keyhole limpet hemocyanin (KLH; Sigma Aldrich) by reaction with M-maleimidobenzoyl-N-hydroxysuccinimide ester. If necessary, a cysteine may be introduced at the N-terminus of the peptide to permit coupling to KLH. Rabbits are immunized with the oligopeptide-KLH complex in complete Freund's adjuvant. The resulting antisera are tested for antipeptide activity by binding the peptide to plastic, blocking with 1% BSA, reacting with rabbit antisera, washing, and reacting with radioiodinated goat anti-rabbit IgG.

[0187] Hybridomas are prepared and screened using standard techniques. Hybridomas of interest are detected by screening with radioiodinated protein to identify those fusions producing a monoclonal antibody specific for the protein. In a typical protocol, wells of 96 well plates (FAST, Becton-Dickinson, Palo Alto Calif.) are coated with affinity-purified, specific rabbit-anti-mouse (or suitable anti-species Ig) antibodies at 10 mg/ml. The coated wells are blocked with 1% BSA and washed and exposed to supernatants from hybridomas. After incubation, the wells are exposed to radiolabeled protein at 1 mg/ml. Clones producing antibodies bind a quantity of labeled protein that is detectable above background.

[0188] Such clones are expanded and subjected to 2 cycles of cloning at 1 cell/3 wells. Cloned hybridomas are injected into pristane-treated mice to produce ascites, and monoclonal antibody is purified from the ascitic fluid by affinity chromatography on protein A (APB). Monoclonal antibodies with affinities of at least 10⁸ M⁻¹, preferably 10⁹ to 10¹⁰ M⁻¹ or stronger, are made by procedures well known in the art.

[0189] XIII Purification of Naturally Occurring Protein Using Specific Antibodies

[0190] Naturally occurring or recombinant protein is substantially purified by immunoaffinity chromatography using antibodies specific for the protein. An immunoaffinity column is constructed by covalently coupling the antibody to CNBr-activated SEPHAROSE resin (APB). Media containing the protein is passed over the immunoaffinity column, and the column is washed using high ionic strength buffers in the presence of detergent to allow preferential absorbence of the protein. After coupling, the protein is eluted from the column using a buffer of pH 2-3 or a high concentration of urea or thiocyanate ion to disrupt antibody/protein binding, and the protein is collected.

[0191] XIV Screening Molecules for Specific Binding with the cDNA or Protein

[0192] The cDNA or fragments thereof and the protein or portions thereof are labeled with ³²P-dCTP, Cy3-dCTP, Cy5-dCTP (APB), or BIODIPY or FITC (Molecular Probes), respectively. Candidate molecules or compounds previously arranged on a substrate are incubated in the presence of labeled nucleic or amino acid. After incubation under conditions for either a cDNA or a protein, the substrate is washed, and any position on the substrate retaining label, which indicates specific binding or complex formation, is assayed. The binding molecule is identified by its arrayed position on the substrate. Data obtained using different concentrations of the nucleic acid or protein are used to calculate affinity between the labeled nucleic acid or protein and the bound molecule. High throughput screening using very small assay volumes and very small amounts of test compound is fully described in Burbaum et al. U.S. Pat. No 5,876,946.

[0193] All patents and publications mentioned in the specification are incorporated herein by reference. Various modifications and variations of the described method and system of the invention will be apparent to those skilled in the art without departing from the scope and spirit of the invention. Although the invention has been described in connection with specific preferred embodiments, it should be understood that the invention as claimed should not be unduly limited to such specific embodiments. Indeed, various modifications of the described modes for carrying out the invention that are obvious to those skilled in the field of molecular biology or related fields are intended to be within the scope of the following claims.

The application's sequence listing, which the Patent Office published only in electronic form, follows.

SEQUENCE LISTING (850 sequences)

SEQ ID NO: 1 - DNA, 1124 bp, Homo sapiens
  misc_feature: Incyte ID No: 400788.4
  unsure 1014, 1054, 1119: a, t, c, g, or other
ggagcgccctgccgagcgcccgccaggctcctcccgctcccgcaccgcctccctctacccacccgccgcacgtactaaggaaggcgcacagcccgccgcgctcgcctctccgccccgcgtccagctcgcccagctcgcccagctcgcccagcgtccgccgcgcctcggccaaggcttcaacggaccacaccaaaatgccatctcaaatggaacacgccatggaaaccatgatgtttacatttcacaaattcgctggggataaaggctacttaacaaaggaggacctgagagtactcatggaaaaggagttccctggatttttggaaaatcaaaaagaccctctggctgtggacaaaataatgaaggacctggaccagtgtagagatggcaaagtgggcttccagagcttcttttccctaattgcgggcctcaccattgcatgcaatgactattttgtagtacacatgaagcagaagggaaagaagtaggcagaaatgagcagttcgctcctccctgataagagttgtcccaaagggtcgcttaaggaatctgccccacagcttcccccatagaaggatttcatgagcagatcaggacacttagcaaatgtaaaaataaaatctaactctcatttgacaagcagagaaagaaaagttaaataccagataagcttttgatttttgtattgtttgcatccccttgccctcaataaataaagttcttttttagttccaaaaaaaaactttatttattgagggcaaggctacttaacaaaggaggacctgagagtactcatggaaaaggagttccctggatttttggaaaatcaaaaagaccctctggctgtggacaaaataatgaaggacctggaccagtgtagagatggcaaagtgggcttccagagcttcttttccctaattgcgggcctcaccattgcatgcaatgactattttgttagtacacatgaagcagaaggggaaaggaaggtagggcaggaaattgagccagtttcgntccctcccctggattaaggaggtttgtccccaaaaggggntcggctttaaagggaaattcttgccccccaccaagcttttccccccattaggaaagggatttttnaatgg

SEQ ID NO: 2 - DNA, 1539 bp, Homo sapiens
  misc_feature: Incyte ID No: 232662.8
  unsure 39: a, t, c, g, or other
ggtttgaggaagcttcgcactccgctttcgaggccagcngaggcggggggcggggatggacacgccccctccctgtctcccaccgatgattggcgcacggaactccgccttgggtttggaaggctcgcctgggagctcatacctggctggggccgaggattggctgttccggggctagggagcgctttctcccgggaaccgcggctgtgacccaagtggcccggaccagtttggggctgcgtgcggcctgcctcaagcaaccaggtacgtaggtcggcggcccagctcggcgctgcggtgggagccggagggcgacagtcagagccggggtgccagcgggacgcgaccgccagatccacttaggaccccgtcgttctgcgaagcggccacgtctgagtcccggggcctcctcgtgctgcagatgtcgccttaggacctcggccaggataccctctgccatgctcttgtgctgcccgtgatcaccgactggcccttgtaagcaccttcgcagcaggaagcccagagctgcgcctgccctttctgaaggctgtggaagaggttggagtgggcgcatcttagcttgccccatccccatttgaggtctgtcggagctgcccttcagtgtgagcatccacaatgggtaccccagcctcggtggtcagtgagccacccccttggcaggccccgattgaggcccggggccgcaagcaggcctcggccaacatcttccaggacgccgagctgctgcagatccaagccctgtttcaacgcagcggggaccagctggccgaggaacgggcacagatcatctgggaatgtgcaggggaccaccgtgtggctgaggccctcaagaggctgcgcaggaagaggcccccaaggcagaaacccctgggccactcgctacaccactgcagccgcctcagaatcctggagccccactctgcactggccaacccacagagtgccacagagacagcctccagtgagcagtatctgcactctaggaagaaaagtgccaggatccgccggaactggaggaagtcaggccccacaagctacctccaccagatcagacactgatccagggaaagagccaggaatggcagtgtcttccctcttgccaaaaggcctggggaggtgaaggaagagagactttaggcaagcagcccaaaggggtaaatgaaagcaagaggctgctgccactgacctgctccattcagaacaagactggatgcttctgttgagctctccattatgtgggacccattcctcaccaaaatgaggagagacagtgactgttcctgccacagtccttcccagtctaacactattcctgggctgcatgatattcccctgggagcaaagtgacaggcacttagatgcagcatttcaccactcatgctactaatcatctacctgctactactgtaaaccatggttccagcagcctgttccacacccccacaccatcaggatagcacagggaaactgtagtttaagtggcaaataaaaacatttgcatcaaaaaaaaaaaaaagg

SEQ ID NO: 3 - DNA, 1722 bp, Homo sapiens
  misc_feature: Incyte ID No: 1297384CB1
tacgagacccggccgcaccccgagtcacacaggcccccggggccacggcgttcgtctctcctgtgctgtcctcaggcctccgctcctgttttggtggcccaggctctcccctgccccatcctcgctcccccacctccttgggtcatgcccacccaccctttcctgcctcctccgtgtgaagacatccaacatccacgtgacttttccagctccatttttaaacagtgactgagattctagaaaaactggctgctaactggcctgagccaggcaacactgattccaatccctcctccttttttaagttatttgatggaagactcacctaatttgtgacctgaaactgttgaagaaatagagaggagggggcccgttgattacagagagcatttgggattttgtttggtttggagatgatgcctaggttactgggtttggggggattgttttcttttgggggccttccccttttactccttttcttccagagatcaagagcttctcttgcatcttcttccactgggctctggattaatcaattacccaaaggctgcacctgccgtgttgtctgggcttgcatcccagatgtgttggagtatgcatggatgtagtgctttttagaggagccactgggcaaggccaccaagaacaaatgcatgacattttatagccaaggacgcctcgctaaagtcttatgggcgtcccctggggttgggggggcacaaggttttggaggaagaagacaacttccctcattccatcatcaccatctctttctcactaggttctttctagttttcaagcaatagttctagcctgccttggacaagggggccccagttaaacaaactacccatccatgaggtgccaggcagtcaaaaacagaagcttccccgacttgtgagtccctgagatgtgctcttgttgtttggcatttggggtgacagggagtgacccagaggccaccactgcttttcatgcaggagttacagacactggtttcttggaaaatggagagaagcgcactttgcacagacgtcgtcaattaagtcccaatttgccacttggtattgagtacactggaccctgaccactggctcttgggcaaacgtccttcctcacggggcgcctccgccaagccggcccagctgcacccctcccttcctggagggatggccagggaaggagaaaacagagaactgacacctttgaaaccacagaatgtgttacatgcagactcgctcaagggcataagttattgtgaacgtttttgccaatcactgctcaacagccctgctagattttgtatgatgctgaattattatgcagactaattccacccagttgagacacaccatgcttgttcacttgtatttattgaaactgtggattcttgcccgtgctgtcccttgtatttactttaagcactgatcacttatcattcattcggtatggttttccctgtcccttgtacacattctggtatgaatttgtaaaaataacctgctacaaattggttgaatgtttctgtctgtggtgcgaaccagcattaacggatggggcacgtgcccaactgaggaacaggagaagaaatcaccaatttgggctctcagagctaagacacacttattgattctgttgcacattttgcactggtttatggcgattgttttcttggacggatagtgtaaaataaacttctctgttctctaaaaaaaaaaa

SEQ ID NO: 4 - DNA, 6508 bp, Homo sapiens
  misc_feature: Incyte ID No: 348151.2
  unsure 2489, 2496, 2498, 3064, 3072: a, t, c, g, or other
agagcgagcaggggagagcgagaccagttttaaggggaggaccggtgcgagtgaggcagccccgaggctctgctcgcccaccacccaatcctcgcctctcttctgctccaccttctctctctgccctcacctctcccccgaaaaccccctatttagccaaaggaaggaggtcaggggaacgctctcccctccccttccaaaaaacaaaaacagaaaaacccttttccaggccggggaaagcaggagggagaggggccgccgggctggccatggagctgctgtgccacgaggtggacccggtccgcagggccgtgcgggaccgcaacctgctccgagacgaccgcgtcctgcagaacctgctcaccatcgaggagcgctaccttccgcagtgctcctacttcaagtgcgtgcagaaggacatccaaccctacatgcgcagaatggtggccacctggatgctggaggtctgtgaggaacagaagtgcgaagaagaggtcttccctctggccatgaattacctggaccgtttcttggctggggtcccgactccgaagtcccatctgcaactcctgggtgctgtctgcatgttcctggcctccaaactcaaagagaccagcccgctgaccgcggagaagctgtgcatttacaccgacaactccatcaagcctcaggagctgctggagtgggaactggtggtgctggggaagttgaagtggaacctggcagctgtcactcctcatgacttcattgagcacatcttgcgcaagctgccccagcagcgggagaagctgtctctgatccgcaagcatgctcagaccttcattgctctgtgtgccaccgactttaagtttgccatgtacccaccgtcgatgatcgcaactggaagtgtgggagcagccatctgtgggctccagcaggatgaggaagtgagctcgctcacttgtgatgccctgactgagctgctggctaagatcaccaacacagacgtggattgtctcaaagcttgccaggagcagattgaggcggtgctcctcaatagcctgcagcagtaccgtcaggaccaacgtgacggatccaagtcggaggatgaactggaccaagccagcacccctacagacgtgcgggatatcgacctgtgaggatgccagttgggccgaaagagagagacgcgtccataatctggtctcttcttctttctggttgtttttgttctttgtgttttagggtgaaacttaaaaaaaaaattctgcccccacctagatcatatttaaagatcttttagaagtgagagaaaaaggtcctacgaaaacggaataataaaaagcatttggtgcctatttgaagtacagcataagggaatcccttgtatatgcgaacagttattgtttgattatgtaaaagtaatagtaaaatgcttacaggaaaacctgcagagtagttagagaatatgtatgcctgcaatatgggaacaaattagaggagacttttttttttcatgttatgagctagcacatacacccccttgtagtataatttcaaggaactgtgtacgccatttatggcatgattagattgcaaagcaatgaactcaagaaggaattgaaataaggagggacatgatggggaaggagtacaaaacaatctctcaacatgattgaaccatttgggatggagaagcacctttgctctcagccacctgttactaagtcaggagtgtagttggatctctacattaatgtcctcttgctgtctacagtagctgctacctaaaaaaagatgttttattttgccagttggacacaggtgattggctcctgggtttcatgttctgtgacatcctgcttcttcttccaaatgcagttcattgcagacaccaccatattgctatctaatggggaaatgtagctatgggccataaccaaaactcacatgaaacggaggcagatggagaccaagggtgggatccagaatggagtcttttctgttattgtatttaaaagggtaatgtggccttggcatttcttcttagaaaaaaactaatttttggtgctgattggcatgtctggttcacagtttagcattgttataaaccattccattcgaaaagcactttgaaaaattgttcccgagcgatagatgggatggtttatgcaagtcatgctgaatactcctcccctcttctcttttgccccctcccttcctgcccccagtctgggttactcttcgcttctggtatctggcgttctttggtacacagttctggtgttcctaccaggactcaagagacaccccttcctgctgacattcccatcacaacattcctcagacaagcctgtaaactaaaatctgttaccattctgatggcacagaaggatcttaattcccatctctatacttctcctttggacatggaaagaaaagttattgctggtgcaaagatagatggctgaacatcagggtgtggcattttgttcccttttccgtttttnttttttnantgttgttgttaattttattgcaaagttgtattcagcgtacttgaatttttcttcctctccacttcttagaggcattcagttagcaaagaggtggagcaacaactttttttttttttttgcacaattgtaattgacaggtaatgaagctatttgttaaaatatttgcctttttaagtaaaaaagaaaaatcagaacagggctatttgaagaattattttatacacagattctgccttgtttcatagtatgagggttgaagacggaaaacaatctaagggtctctcatttttttaattttgttttgttcagtttggttttttttttttttgcgctgctaagaagctaaagtcatccatccttattcacgttgacagtacctagctgtaatgtttcacagagtgtgctgctattttataaacatttttataatatattattttactgcttaaattccaagtcctgaagtagatggttgagatatgagttcttcgtactggaaaagcccttccgtagtttgttttcttctggtagcatattcatggttgtttttttttttcttttttggntttttggnttttttttttcctctgatcacattcttcaaagacggagtattctttacctcaggtttactggacaaaatcaataactacaaaaggcaatgattcacgcttttgttttcataatacctcacaaccgtacagtttctgcttgggagcccattcgcatgaggaatacagaagcagtgtgagcagggctgactccctctcaggtggaaggcagggcggtctcactcccagggacctttttggtcatggaggccatcgggctcccagttagaccctggtatcctcatcatgatggaaaaaatacattgaaccaagggatcctccctccccttcaaggcagacgttcagtacaaacatttatgcggtaggctcagatgtcgtaatttgcacttaggtaccaggtgtcaggaaacagactaaaaagaattccaccaggctgtttggagatcctcatcttggagctttttcaaaagcggggcttcatctgcaaagggccctttcatcttgaagtttttcccctccgtctttcccctcccctggcatggacaccttgtgtttaggatcatctctgcaggcttcctaggtctgaatctgcgagtagatgaacctgcagcaagcagcgtttatggtgcttccttctccctcctctgtctcaaactgcgcaggcaagcactatgcaagcccaggccctctgctaagcggtactaaacggtcgggttttcaatcacactgaattggcaggataagaaaaataggtcagataagtatgggatgatagttgaagggaggtgaagaggctgcttctctacagaggtgaaattccagatgagtcagtctcttgggaagtgtgtttagaagggttcaggactttgtgagttagcatgaccctaaaattctaggggatttctggtgggacaatgggtggtgaattctgaagttttggagagggaagtggagcagccagcaagtaagctagccagagttttctcaagagccagctttgctcagcacactctcctgggccccaaggagtcccacggaatggggaaagcgggaaccctggagttcttgggaatcttggagcctaaagagaaaccgaggtgcaaattcatttcatggtgactgacccttgagcttaaacagaagcagcaaatgaaagaaccggacaaataaggaagggcacaagcctacccgactctatttacagtctgtaactttccactcttcctgtagtcccgaggcccctgggtccttctagcttttctctttcccatccttggggccttgtgtgatgatgggtgtggggctgccgatgggaaagtcgggggttgttaggcttttctgcctgctcctgcttaaacacaagaaggaatcctggattttgccctctccttagctcttagtctctttggtaggagttttgttccagaggagctctcccccttggatttgaacttgctctttttgttgtttgttgttctttctcttctttttcttacctcccactaaaggggttccaaattatcctggtctttttctaccttgttgtgtttctatctcgtctttacttccatctgtttgtttttttctccatcagtgggggccgagttgttcccccagcctgccaaattttgatccttcccctcttttggccaaatcctagggggaagaaatcctagtatgccaaaaatatatgctaagcataattaaactccatgcgggtccataacagccaagaagcctgcaggagaaagccaagggcagttccctccgcagaacaccccatgcgtgctgagaggcgagctccttgaagaaggggctgttcttccaggaggccttattttgaactgcctcaggaccccactggagagcacagcatgccttactactgggtcatccttggtctatgtgctctgtactggaggctctgttctgcctcttatcagccaggtcaggggcacacatggcttaagtgacaaagccagaggagaagacaaccctgacagcatcacgctgcatcccattgctagcaggattggcaactcttcagacggagctgcgcttccctgcagtctagcacctctagggcctctccagactgtgccctgggagctctgggactgaaaggttaagaacataaggcaggatcagatgactctctccaagagggcaggggaattttctctccatgggccacaggggacagggctgggagaagaaatagacttgcaccttatgtcatgtaaataattgattttctagttcaagaagataatattggtagtgtgggaattggaggtaggaaggggaggaagtctgagtaagccagttggcttctaagccaaaaggattcctctttgtttatctctgagacagtccaaccttgagaatagctttaaaagggaaattaatgctgagatgataaagtccccttaagccaacaaaccctctgtagctatagaatgagtgcaggtttctattggtgtggactcagagcaatttacaagagctgttcatgcagccatccatttgtgcaaaatagggtaagaagattcaagaggatatttattacttcctcataccacatggcttttgatgattctggattctaaacaacccagaatggtcatttcaggcacaacgatactacattcgtgtgtgtctgcttttaaacttggctgggctatcagaccctattctcggctcaggttttgagaagccatcagcaaatgtgtacgtgcatgctgtagctgcagcctgcatcccttcgcctgcagcctactttggggaaataaagtgccttactgactgtagccattacagtatccaatgtcttttgacaggtgcctgtccttgaaaaacaaagtttctatttttatttttaattggtttagttcttaactgctggccaactcttacatccccagcaaatcatcgggccattggattttttccattatgttcatcacccttatatcatgtacctcagatctctctctctctcctctctctcagttatatagtttcttgtcttggacttttttttttcttttctttttcttttttttttgctttaaaacaagtgtgatgccatatcaagtccatgttattctctcacagtgtactctataagaggtgtgggtgtctgtttggtcaggatgttagaaagtgctgataagtagcatgatcagtgtatgcgaaaaggtttttaggaagtatggcaaaaatgttgtattggctatgatggtgacatgatatagtcagctgccttttaagaggtcttatctgttcagtgttaagtgatttaaaaaaataataacctgttttctgactagtttaaagatggatttgaaaatggttttgaatgcaattaggttatgctatttggacaataaactcaccttgaccttaaaaaaaaaaaaaagcggacgctcgcatcta

SEQ ID NO: 5 - DNA, 10249 bp, Homo sapiens
  misc_feature: Incyte ID No: 256009.20
cctgcccaaggctgacgttgatgtctcaggccccaaagtggacgttgaaggccctgatgttaacattgaaggaccagagggaaagttgaaagggcccaagttcaagatgccagagatgaatatcaaagcccccaagatccccatgcctgactttgatttgcatctgaaaggtcccaaggtgaagggcgatgtggatatttctctgcccaaagtggaaggtgacctcaagggccctgaagttgacatcaggggtcccaaagtggacattgatgttccagacgtgggcgttcaaggcccagactggcacctaaaaatgcccaaagtgaagatgcctaaaataaaaatgcccaagatcagcatgcctggcttcaaaggagaaggtccagaagtggacgtgaacctgcccaaggctgaccttgacgtctcaggacccaaggtggacgttgatgttccagatgtgaatattgaaggtccagatgcgaaactgaagggccctaaattcaagatgccagagatgaacatcaaagctcctaaaatatcaatgcctgatttggacctcaatcttaaaggccctaaaatgaaaggagaggtggatgtttcacttgcaaatgtagaaggtgatttgaaaggacctgctcttgacataaaaggcccaaagatagatgtagatgctccagatattgacattcatggcccagatgccaaattaaaaggtccaaaactgaagatgcctgacatgcatgtaaacatgcccaagatctccatgccagaaattgacttgaatttgaaaggctcaaagcttaagggagatgttgatgtctctgggcccaagttggaaggtgacattaaagctcccagtttggatataaagggcccagatgtggacgtttccggtcctaagcttaatatcgaaggcaagtcaaagaaatctcgttttaagcttcccaaatttaatttttcgggctctaaagttcagacacctgaagtggatgtcaaaggtaaaaagccagatattgacataacaggtccaaaagttgatattaatgctcctgatgtcgaggtccaaggaaaagtgaaaggatccaagtttaaaatgcctttcctgagtatttcatctcccaaagtttctatgcctgacgtggagctaaatttgaaaagtcccaaagtcaaaggagacttagatattgcaggtcccaatttagaaggtgactttaaaggccccaaagtggatattaaggcaccagaagtcaatcttaatgcacctgatgtggatgttcatggtccagactggaatctgaaaatgcccaagatgaaaatgcccaaattcagtgtgtctggcttaaaagcagaagggccagatgtagctgtggatctaccaaaaggagacatcaacatagagggcccaagtatgaacattgagggcccagatctcaatgtggaaggtccggagggaggcttgaaaggtcccaaattcaagatgcctgacatgaatatcaaagctcccaagatctccatgcctgacattgacttaaacttgaaaggccccaaggtgaaaggtgatgtggatatttctcttcccaaacttgaaggggatctgaaagggccagaggttgatatcaaaggccctaaagtggacatcaatgccccagatgtggatgttcatggtccagactggcatctgaagatgcccaaagtgaaaatgcccaagttcagcatgcctggcttcaaaggagaaggccctgaagtcgatgttaccctccctaaagctgacattgacatttctggtcccaatgtagacgttgatgttccagacgtgaatattgaaggtccagatgcaaagctgaagggccccaagttcaagatgcctgagatgaacatcaaagcccccaagatctccatgcctgactttgacctgaacttgaagggacccaaaatgaagggtgatgtggttgtgtctttgcccaaagtggaaggtgatctaaaaggccctgaggtggacatcaagggccccaaagtggacattgacactcctgacattaacatcgaaggctcagagggtaaattcaagggacccaaatttaagataccagagatgcacctgaaggctcccaaaatatcgatgcctgacattgatttaaacctgaagggccccaaagtcaagggcgatgtggatgtttctctgcccaaaatggaaggtgacctcaagggtcctgaagttgacatcaagggccccaaagtggacattaatgctccagatgttgatgttcaaggcccagactggcacctgaagatgcccaaggtgaaaatgcccaagttcagcatgcctggcttcaaaggagagggcccagatgtggatgtgaacctgcccaaggctgaccttgatgtctcaggacccaaggtggacattgatgttccagatgtgaatatcgaaggcccagagggaaagttgaaaggtcccaaattcaagatgcctgagatgaacatcaaagcccccaagatctccatgcctgacattgatcttaacctgaaaggacccaaagtgaagggtgatatggatgtgtctctgccaaaagtggaaggtgacatgcaagttcctgacttggatattaaaggccccaaagtggatattaatgccccagatgtggatgttcgaggcccagactggcacctgaagatgcctaagataaaaatgcccaagatcagcatgcctggcttcaaaggagaaggtccagaagtggatgtgaacctgcccaaggctgaccttgacgtctcaggacccaaggtggacgttgatgttccagatgtgaatattgaaggtccagatgcgaaactgaagggccctaaattcaagatgccagagatgaacatcaaagcccccaagatctccatgcctgactttgatttgcatctgaaaggccctaaggtgaaaggagatgtggatgtttctctgcctaagatggaaggtgatctaaaggcccctgaagttgacatcaagggccccaaagtggacattgatgccccagatgtggatgttcatggcccagactggcacctgaagatgcccaaggtgaaaatgcccaaattcagcatgccaggatttaaaggagagggcccagaagtggatgttaatttgcccaaagctgacattgatgtctcaggacccaaagtggacattgacactcctgatattgatattcatggtccagaagggaaactgaagggccccaaatttaaaatgcctgacctgcacctcaaggcaccgaagatctctatgcctgaagttgacctgaatctgaaaggtccaaagatgaagggcgacgtggacgtttctctgcccaaagtggaaggcgacctcaagggccctgaagttgacatcaagggccccaaagtggacattgatgtcccagatgtggacgttcaaggcccagactggcacttaaaaatgcccaaagtgaaaatgcccaagttcagcatgcctggcttcaaaggagagggcccagatgtggatgtgaacctgcccaaggctgaccttgacgtctcaggacccaaggtggacattgatgttcctgatgtgaatatcgaaggtccagatgcgaaactaaagggccctaaattcaagatgcctgagatgaacatcaaagcccccaagatctccatgcctgactttgatttgcatctgaaaggtcccaaggtgaagggtgatgtggatgtttcccttcctaaagtggaaggtgacctcaagggcccagaagttgacatcaagggccccaaagtggacatcgatgcccctgatgtagatgttcatggcccagactggcacctgaagatgcccaaggtgaaaatgcccaaattcagcatgccaggattcaaaggagagggcccagatgtggatgttacccttcctaaggctgacattgagatttctggccccaaagtggacattgatgcccctgatgtcagtatcgaaggtccagatgcaaaactcaagggtccaaagttcaagatgccagagatgaacatcaaggcccccaaaatctccatgcctgacattgactttaacttgaagggtcccaaagtgaaaggtgatgtggatgtctctctgcccaaagtggaaggtgatctcaagggccctgaaattgacataaaaggccccagtttggacattgacacacctgatgtcaatattgaaggtccggaaggaaaattgaaggggcccaaatttaagatgcctgagatgaacatcaaagctcccaaaatctctatgcctgactttgatttgcacctgaaaggtcccaaggtgaagggtgatgtggatgtttcactacctaaggtggaaagtgatctgaaagggccagaggtagacattgaaggtcctgaagggaagctcaaaggtcccaagtttaagatgcctgatgtacatttcaaaagcccacaaatctccatgagtgacattgatttgaatttgaaaggacctaagataaaaggagatatggacatttccgttcctaaactggagggagatctgaaaggtcccaaagtggatgtcaaaggccctaaagtgggcattgacactcctgatattgacattcatggtccagaagggaaactgaagggccccaaatttaaaatgcctgacttacacctcaaggcaccgaagatctctatgcctgaagttgacctgaatctgaaaggtccaaaggtgaagggcgacatggacatttctctgcccaaagtggaaggcgacctcaagggccccgaagttgacatcagggaccccaaagtggacattgatgtcccagatgtggacgttcaaggcccagactggcacctaaaaatgcccaaagtgaaaatgcccaagttcagcatgcctggcttcaaaggagagggcccagatgtggatgtgaacctgcccaaggctgacattgatgtctcaggacccaaagtggacgttgatgttcctgatgtgaatatcgaaggtccagatgcgaaactaaagggccccaagttcaagatgcctgagatgagcatcaaagcccccaagatctccatgcctgatattgacttaaacctgaaaggacccaaagtgaagggcgatgtggatgttacccttcctaaagtggaaggtgacctcaagggcccagaagctgacatcaagggcccaaaagtggacatcaacacccctgatgtggatgttcatggcccagactggcacctgaagatgcccaaggtgaaaatgcccaaattcagcatgcctggcttcaaaggagaaggtccagatgtggatgtgagcctgcccaaggccgacatcgatgtctcgggacccaaagtggacgttgatattccagatgtgaatatcgaaggtccagatgcgaaactaaagggccccaagttcaagatgcctgagatgagcatcaaagcccccaagatctccatgcctgatattgacttaaacctgaaaggacccaaagtgaagggcgatgtggatgttacccttcctaaagtggaaggtgacctcaagggcccagaagctgacatcaagggcccaaaagtggacatcaacacccctgatgtggatgttcatggcccagactggcacctgaagatgcccaaggtgaaaatgcccaaattcagcatgcctggcttcaaaggagaaggtccagatgtggatgtgagcctgcccaaggccgacatcgatgtctcgggacccaaggtggacgttgatattccagatgtgaatatcgaaggtccagacgcaaaactgaagggccccaagttcaagatgcctgaaataaatatcaaagctcccaagatctccatacctgatgttgacctggatttgaaaggacccaaagtaaaaggagattttgatgtgtctgtccctaaggttgaagggactttgaaaggcccagaagtagatcttaaaggtccacgtctggatttcgaaggccctgatgccaaactcagtggcccatctttgaagatgccatcgctggagatatctgctcctaaagtaactgctcctgatgttgatttgcatctcaaggcaccaaaaattggattttcaggtccgaagttagaaggtggtgaagtggacctcaagggacccaaagttgaagctccaagcttagatgtacacatggacagcccagatattaacatcgaagggccagatgttaaaatccccaaatttaagaaacccaagtttggatttggggcaaaaagccccaaagctgacatcaagtcaccttcactggatgtcactgttcctgaggcagagctgaaccttgagactcctgaaattagtgttggtggcaagggcaagaaaagtaagtttaaaatgcctaaaattcatatgagtggtcctaagattaaggccaaaaaacagggatttgacctgaatgttcctgggggtgaaattgatgccagcctcaaggctccggatgtagatgtcaacatcgcagggccggatgctgcactcaaagtcgacgtgaaatcgcccaaaaccaagaaaacgatgtttggaaaaatgtacttcccagatgtagagtttgacattaaatcacctaaatttaaagctgaggcccctctccctagccccaaactggagggtgaactccaggcacctgatctggaactttctttgccagcgattcacgtcgaaggtcttgacatcaaggcgaaggctcccaaggtcaagatgccagatgtggacatctcagtgccaaaaatagagggtgacctgaaaggccccaaagtgcaggcaaacttgggtgcacctgacatcaacatcgaaggcctagatgctaaagtcaaaacaccgtccttcggcatttctgcccctcaagtctccatccctgatgtgaatgtaaacttgaaaggaccaaagataaagggtgatgtccccagcgtgggactggaaggaccagatgtagatctgcaaggtccagaagcaaaaattaagttccccaagttttccatgcccaagatcggcatcccaggtgtgaaaatggagggtgggggagccgaggtccatgcccagctaccctctcttgaaggagacttgagaggaccagatgttaagctcgaagggcccgatgtttctctaaaggggccaggagtagacttgccttcagtgaacctctctatgccaaaagtctctgggcctgaccttgatctgaacttgaaaggaccaagtttgaagggagacctggatgcatctgttcccagcatgaaggtgcatgctccagggctcaacctcagtggtgtcggtggcaaaatgcaggtgggaggagacggtgtgaaagtgccagggatcgatgccacaacaaagcttaacgttggggcaccagatgtgacactgaggggaccaagcctgcagggagatctggctgtctctggtgacatcaaatgccctaaagtatccgtaggagctcctgatctaagcttggaggcatccgaaggcagcattaaacttcccaaaatgaagctgccccaatttggcatctctactccggggtccgacttgcacgtcaatgccaaggggccacaggtttctggcgaactgaaggggccaggtgtggatgtgaacctgaaagggcctcggatttcagcaccgaatgtggactttaacttggaaggaccaaaagtgaaagggagccttggggccactggtgagatcaaaggccccactgtcggaggaggtcttccaggcattggtgttcaaggcctagaaggaaacctccagatgcctggaattaagtcctctggatgtgatgtgaacctgccaggcgtgaatgtgaaactcccaactgggcagatttctgggcctgaaatcaaaggtggtctgaaaggttcagaagtaggtttccatggggctgctcctgatatcagtgtgaaggggcctgcctttaatatggcatctcctgagtcagattttggcatcaacttgaagggcccaaaaatcaaaggaggtgcggatgtttcagggggtgtcagtgccccagacatcagccttggtgaagggcatttgagtgttaaaggttccgggggtgagtggaagggaccccaagtctcctctgctctcaacttggacacatctaagtttgctgggggccttcatttctcaggaccaaaggtggaaggaggtgtgaaaggaggtcagattggactccaggctcctgggctgagtgtgtctgggcctcaaggtcacttggaaagtggatctggaaaagtaacattccctaaaatgaagatccccaaatttaccttctctggccgtgagctggttggcagagaaatgggggtggatgttcacttccctaaagcagaggccagcatccaagctggtgctggagacggcgagtgggaagagtctgaagtcaaactgaaaaagtccaagatcaaaatgcccaagtttaatttttccaaacctaaagggaaaggtggtgtcactggctcaccagaagcatcaatttctgggtccaaaggtgacctgaaaagttcaaaggccagcctgggctctctggaaggagaggcagaggccgaagcctcttcaccgaaaggcaaattctccttatttaaaagtaagaagccacggcaccgctcaaattcattcagtgatgaaagagagttctctggaccttccaccccgacggggacgctggagtttgaaggtggggaagtgtctctggaaggtgggaaagttaaagggaaacacgggaagctgaaattcggtacctttggtggattggggtcaaagagcaaaggtcattatgaggtgactgggagcgatgatgagacaggcaagttacaggggagtggggtgtccctggcctctaagaagtcccgactgtcctcctcttctagcaatgacagtgggaataaggttggcatccagcttcccgaggtggagctgtcagtttccacaaagaaagagtagcaggcctttgtatgtgtgtacatatatatatatataacaaaacatcagccttgggtggtgtgttcctatataaactccaaagggaaacacaccgactgcctcagcaatcatgcaaagaccttgcctggcccggtggcaagcgctgaaaaaccgaccgcctgtaggctcctggaactatacagataggtaaagagttccaagttcgtccagcccatgtgcaaagtcaacagtatttgccttaagatttcatatatatatatttttttgcattgactgctgagagctcctgtttactaagcaagcttttgtgtttattatcctcatttttactgaacattgttagttttggggtaatggaaacccactttttcattgtaatgactttgggggcttttgttagtaagggtgggtggggtgatgggttgcagacggaggtcaggtcttcctctttcctgagactggatctgttcaaacagcaaacgcccacagatggcccagaggtggtggtagtcagggtgtgtgggtgtttttagggttctttagtgttgtttctttcacccaggggtggtggtcccagccagtttggtgctgacggtgagaggaaattagaatctgtttgcaaattgtccaacccaccccctcaacatgaggggcttccattttctgtgttttgtaagggaactgtttccttcatgccgccatgttcctgatattagttctgatttctttttaacaaatgttatcatgattaagaaaatttccagcactttaatggccaattaactgagaatgtaagaaaattgatgctgtacaaggcaaataaagctgtttattaaccttgtacagcatcaattttcttacattttctgtgttttgtaagggaactgtttccttcatgccgccatgttcctgatattagttctgatttctttttaacaaatgttatcatgattaagaaaatttccagcactttaatggcctattggtactttggggtgctgatacccaaaacagatgcaatcttctctccaaggaagtcacacactgagagagttgatgtagcagcccgaagcatgtaaaaccataagtagggaccccaggtaagttttgtcggatcaacagtaggcaaaacatctttcttctccaggccatcaacttcgtcttcatctgtgctatattcttccattgtttcaccactaacaaagtggatgactctccttgggactttcttcttttttcctatgactcccagttctacattttcaaagcctctttcgttactcatctgccctgcagattccccgaatgccg

SEQ ID NO: 6 - DNA, 650 bp, Homo sapiens
  misc_feature: Incyte ID No: 981640.2
tttataaataaataataaatacataaatatcagaaagtaaaagaggaaaaaactgaaccttgaatttttttcttttagaatatttataatatttaacgtatttgaaggtgaaggccatcctacatggacatctgaagctttagctaagtattatcttttctgtaatgtgactattggtttgcagttcggttcttcttttcgaatagtatgagattaattttctcagtacttaaatcactcctcagttaagttggatgttcatggaggaacattctttccttcaggttgctgatacatttgctgcactgtaggggagggagtgggtatctgagttagtcagttttaccatttataaaatgtttggtggaggaaattgaaactaattgctaaattgttagtaaccagtgcattaactaggaccctactgagtggactgaaagaatcgaaaatgtttaactggttgagaggcaatgatgttgcaaatggggtattcttcaaagctccttctttttttaaatcttcaaaggcaattattctgaatgtaaactacagaccaaattgcagtcttctgtaagcatttcagagattacctcaaatattttttgattaaaaaactcttccgtggtcttttgtgcttcagaactacccag

SEQ ID NO: 7 - DNA, 5503 bp, Homo sapiens
  misc_feature: Incyte ID No: 021834.19
aagcggccagacaaatcccacccccggccccgcccgtcacatccatcttgctccccaggcgacgctttctcggagaagcgaggggcggggaggggaaatctaagcctttgggggttgccgacaggtgtttgggggagaaggcggagctggggtagggaggatgaggagggaggggcggtgctgcccctttaagaggaggcggccgagccgggatctttttctctttccccggaaggaaagcgcagcccgggctgggctcgcaaggtggggaggtgcgggactgggcgtggggaggcggggcgcgcgccgggggacccctccctcctgtcctccttgcggtcgaccggtgcgcttgccagatccgccgcgaagccgggatcgaaggcgacagcgcggccaagggggcgcggccgggacaagctgggggccggttgcccggggcagggacggcggcgacccggccgctggggaggcaggaagatagacccacggatcttaggaagggatccgagagcgcagctgtgaaactggctggggctgggggcacgaaaccgatcagcgctacggagcgcagcggccggcgggttccagtgtcctccggcggcgcggggagcaggtgaacaggtcctcacgcccagctccgccccctcacgcgctctcgccgggaccccgcttccgctggcagccatgggccccggccccagccgcgcgccccgcgccccacgcctgatgctctgtgcgctcgccttgatggtggcggccggcggctgcgtcgtctccgccttcaacctggatacccgattcctggtagtgaaggaggccgggaacccgggcagcctcttcggctactcggtcgccctccatcggcagacagagcggcagcagcgctacctgctcctggctggtgccccccgggagctcgctgtgcccgatggctacaccaaccggactggtgctgtgtacctgtgcccactcactgcccacaaggatgactgtgagcggatgaacatcacagtgaaaaatgaccctggccatcacattattgaggacatgtggcttggagtgactgtggccagccagggccctgcaggcagagttctggtctgtgcccaccgctacacccaggtgctgtggtcagggtcagaagaccagcggcgcatggtgggcaagtgctacgtgcgaggcaatgacctagagctggactccagtgatgactggcagacctaccacaacgagatgtgcaatagcaacacagactacctggagacgggcatgtgccagctgggcaccagcggtggcttcacccagaacactgtgtacttcggcgcccccggtgcctacaactggaaaggaaacagctacatgattcagcgcaaggagtgggacttatctgagtatagttacaaggacccagaggaccaaggaaacctctatattgggtacacgatgcaggtaggcagcttcatcctgcaccccaaaaacatcaccattgtgacaggtgccccacggcaccgacatatgggcgcggtgttcttgctgagccaggaggcaggcggagacctgcggaggaggcaggtgctggagggctcgcaggtgggcgcctattttggcagcgccattgccctggcagacctgaacaatgatgggtggcaggacctcctggtgggcgccccctactacttcgagaggaaagaggaagtagggggtgccatctatgtcttcatgaaccaggcgggaacctccttccctgctcacccctcactccttcttcatggccccagtggctctgcctttggtttatctgtggccagcattggtgacatcaaccaggatggatttcaggatattgctgtgggagctccgtttgaaggcttgggcaaagtgtacatctatcacagtagctctaaggggctccttagacagccccagcaggtaatccatggagagaagctgggactgcctgggttggccaccttcggctattccctcagtgggcagatggatgtggatgagaacttctacccagaccttctagtgggaagcctgtcagaccacattgtgctgctgcgggcccggcccgtcatcaacatcgtccacaagaccttggtgcccaggccagctgtgctggaccctgcactttgcacggccacctcttgtgtgcaagtggagctgtgctttgcttacaaccagagtgccgggaaccccaactacaggcgaaacatcaccctggcctacactctggaggctgacagggaccgccggccgccccggctccgctttgccggcagtgagtccgctgtcttccacggcttcttctccatgcccgagatgcgctgccagaagctggagctgctcctgatggacaacctccgtgacaaactccgccccatcatcatctccatgaactactctttacctttgcggatgcccgatcgcccccggctggggctgcggtccctggacgcctacccgatcctcaaccaggcacaggctctggagaaccacactgaggtccagttccagaaggagtgcgggcctgacaacaagtgtgagagcaacttgcagatgcgggcagccttcgtgtcagagcagcagcagaagctgagcaggctccagtacagcagagacgtccggaaattgctcctgagcatcaacgtgacgaacacccggacctcggagcgctccggggaggacgcccacgaggcgctgctcaccctggtggtgcctcccgccctgctgctgtcctcagtgcgcccccccggggcctgccaagctaatgagaccatcttttgcgagctggggaaccccttcaaacggaaccagaggatggagctgctcatcgcctttgaggtcatcggggtgaccctgcacacaagggaccttcaggtgcagctgcagctctccacgtcgagtcaccaggacaacctgtggcccatgatcctcactctgctggtggactatacactccagacctcgcttagcatggtaaatcaccggctacaaagcttctttggggggacagtgatgggtgagtctggcatgaaaactgtggaggatgtaggaagccccctcaagtatgaattccaggtgggcccaatgggggaggggctggtgggcctggggaccctggtcctaggtctggagtggccctacgaagtcagcaatggcaagtggctgctgtatcccacggagatcaccgtccatggcaatgggtcctggccctgccgaccacctggagaccttatcaaccctctcaacctcactctttctgaccctggggacaggccatcatccccacagcgcaggcggcgacagctggatccagggggaggccagggccccccacctgtcactctggctgctgccaaaaaagccaagtctgagactgtgctgacctgtgccacagggcgtgcccactgtgtgtggctagagtgccccatccctgatgcccccgttgtcaccaacgtgactgtgaaggcacgagtgtggaacagcaccttcatcgaggattacagagactttgaccgagtccgggtaaatggctgggctaccctattcctccgaaccagcatccccaccatcaacatggagaacaagaccacgtggttctctgtggacattgactcggagctggtggaggagctgccggccgaaatcgagctgtggctggtgctggtggccgtgggtgcagggctgctgctgctggggctgatcatcctcctgctgtggaagtgcggcttcttcaagcgagcccgcactcgcgccctgtatgaagctaagaggcagaaggcggagatgaagagccagccgtcagagacagagaggctgaccgacgactactgagggggcagccccccgcccccggcccacctggtgtgacttctttaagcggacccgctattatcagatcatgcccaagtaccacgcagtgcggatccgggaggaggagcgctacccacctccaggggagcaccctgcccaccaagaagcactgggtgaccagctggcagactcgggaccaatactactgacgtcctccctgatcccaccccctcctcccccagtgtcccctttcttcctatttatcataagttatgcctctgacagtccacaggggccaccacctttggctggtagcagcaggctcagggcacatacacctcgtcaagagcatgcacatgctgtctggccctggggatcttcccacaggagggccagcgctgtggaccttacaacgccgagtgcactgcattcctgtgccctagatgcacgtggggcccactgctcgtggactgtgctggtgcatcacggatggtgcatgggctcgccgtgtctcagcctctgccagcgccagcgccaaaacaagccaaagagcctcccaccagagccgggaggaaaaggcccctgcaatgtggtgacacctccccctttcacactggatccatcttgagccacagtcactggattgactttgctgtcaaaactactgacagggagcagcccccgggccgctggctggtgggcccccaatgacacccatgccagagaggtggggatcctgcctaaggttgtctacgggggcacttggaggacctggcgtgctcagacccaacagcaaaggaactagaaagaaggacccagaacggcttgctttcctgcatctctgtgaagcctctctccttggccacagactgaactcgcagggagtgcagcaggaaggaacaaagacaggcaaacggcaacgtagcctgggctcactgtgctggggcacggcgggatcctccacagagaggaggggaccaattctggacagacagatgttgggaggatacagaggagatgccacttctcactcaccactaccagccagcctcagaaggccccagagagaccctgcaagaccacggagggagcgacacttgaatgtagaataggcagggggccctgccccaccccatccagccagaccccacgctgaccatgcgtcaggggcctagaggtggagttcttagctatccttggctttcagagccagcctggctctgccccctcccccatgggctgtgtcctaaggcccatttgagaagctgaggctagttccagaaaacctctcctgacccctgcctgttggcaggcccactccccagccccagccccttccatggtactgtagcaggggaattccctccccctccttgtgccttctttgtatataggcttctcacggcgaccaataaacagctcccagtttgtaaaaataggagacccatataaaaggccaagcttgaggtctggggctccctaagccaaacatgtgacacgagtaatgaggtgtttagcatttgaaagggactggcagccctcttctgggtaagtggaaggagaggcactggatcccattctttaggagctgtgcttctgtaaaacagaagttggaatccaaagccagtgacatatgaattacgaagatgagagctgccagacatttatggcgaacaagata

SEQ ID NO: 8 - DNA, 1056 bp, Homo sapiens
  misc_feature: Incyte ID No: 2743030CB1
gtctgaagggcgggacattccccctgcctcttcgcaccacagccagagcctgccattaggaccaatgaaagcaaagtacctcatcccctcagtgactaagaatcgcagtatttaagaggtagcaggaatgggctgagagtggtgtttgctttctccaccagaagggcacactttcatctaatttggggtatcactgagctgaagacaaagagaagggggagaaaacctagcagaccaccatgtgctatgggaagtgtgcacgatgcatcggacattctctggtggggctcgccctcctgtgcatcgcggctaatattttgctttactttcccaatggggaaacaaagtatgcctccgaaaaccacctcagccgcttcgtgtggttcttttctggcatcgtaggaggtggcctgctgatgctcctgccagcatttgtcttcattgggctggaacaggatgactgctgtggctgctgtggccatgaaaactgtggcaaacgatgtgcgatgctttcttctgtattggctgctctcattggaattgcaggatctggctactgtgtcattgtggcagcccttggcttagcagaaggaccactatgtcttgattccctcggccagtggaactacacctttgccagcaccgagggccagtaccttctggatacctccacatggtccgagtgcactgaacccaagcacattgtggaatggaatgtatctctgttttctatcctcttggctcttggtggaattgaattcatcttgtgtcttattcaagtaataaatggagtgcttggaggcatatgtggcttttgctgctctcaccaacagcaatatgactgctaaaagaaccaacccaggacagagccacaatcttcctctatttcattgtaatttatatatttcacttgtattcatttgtaaaactttgtattagtgtaacatactccccacagtctacttttacaaacgcctgtaaagactggcatcttcacaggatgtcagtgtttaaatttagtaaacttcttttttgtttgttaaaaaaaaaaaaaaa

SEQ ID NO: 9 - DNA, 1199 bp, Homo sapiens
  misc_feature: Incyte ID No: 4947167CB1
cagatccatcaggtccgagctgtgttgactaccactgcttttcccttcgtctcagttatgtcttggaagaaggctttgcggatccccggagaccttcgggtagcaactgtcaccttgatgctggcgatgctgagctccctactggctgagggcagagactctcccgaggatttcgtgttccagtttaagggcatgtgctacttcaccaacgggacggagcgcgtgcgtcttgtgaccagatacatctataaccgagaggagtacgcgcgcttcgacagcgacgtgggggtgtaccgcgcggtgacgccgcaggggcggcctgatgccgagtactggaacagccagaaggaagtcctggaggggacccgggcggagttggacacggtgtgcagacacaactacgaggtggcgttccgcgggatcttgcagaggagagtggagcccacagtgaccatctccccatccaggacagaggccctcaaccaccacaacctgctggtctgctcggtgacagatttctatccaggccagatcaaagtccggtggtttcggaatgatcaggaggagacagccggcgttgtgtccaccccccttattaggaatggtgactggactttccagatcctggtgatgctggaaatgactccccagcgtggagatgtctacacctgccacgtggagcaccccagcctccagagccccatcaccgtggagtggcgggctcagtctgaatctgcccagagcaagatgctgagtggcgttggaggcttcgtgctggggctgatcttccttgggctgggccttatcatccgtcaaaggagtcagaaagggcttctgcactgactcctgagactattttaactaggattggttatcactcttctgtgatgcctgcttatgcctgcccagaattcccagctgcctgtgtcagcttgtccccctgagatcaaagtcctacagtggctgtcacgcagccaccaggtcatctcctttcatccccaccccaaggcgctggctgtgactctgcttcctgcactgacccagagcctctgcctgtgcatggccagctgcgtctactcaggtcccaaggggtttctgtttctattctttcctcagactgctcaagagaagcacatgaaaaacattacctgactttagagcttttttacataattaaacatgatcctgagttatctgta

SEQ ID NO: 10 - DNA, 4355 bp, Homo sapiens
  misc_feature: Incyte ID No: 1383009.13
  unsure 44, 400: a, t, c, g, or other
tgaaggcgatcttttaaaaagagattaaaccgaaggtgattaanagaccttgaaattattttaatcacctacaacttttaaactaatttgaaggcgatcttttaaaaagagattaaaccgaaggtgattaaaagaccttgaaatccatgacgcagggagaattgccgtcatttaaagcctagttaacgcatttactaaacgcagacgaaaatggaaagattaattgggagtggtaggatgaaacaatttggagaagatagaagtttgaagtggaaaactggaagacagaagtacgggaaggcgaagaaaagaatagagaagatagggaaattagaagataaaaacatacttttagaagaaaaaagataaatttaaacctgaaaagtaggaagcagaaganaaaagacaagctaggaaacaaaaagctaagggcaaaatgtacaaactagaagaaaattggaaagatagaaacaagatagaaaatgaaaatattgtcagagtttcagatagaaaatgaaaaacaagctaagacaagtattggagaagtatagaagatagaaaaatataaagccaaaaattggataaaatagcactgaaaaaatgaggaaattattggtaaccaatttattttaaaagcccatcaatttaatttctggtggtgcagaagttagaaggtaaagcttgagaagatgagggtgtttacgtagaccagaaccaatttagaagaatacttgaagatagaagtttgaagtggaaaactggaagacagaagtacgggaaggcgaagaaaagaatagagaagatagggaaattagaagataaaaacatacttttagaagaaaaaagataaatttaaacctgaaaagtaggaagcagaagaaaaaagacaagctaggaaacaaaaagctaagggcaaaatgtacaaacttagaagaaaattggaagatagaaacaagatagaagtttgaagtggaaaactggaagacagaagtacgggaaggcgaagaaaagaatagagaagatagggaaattagaagataaaaacatacttttagaagaaaaaagataaatttaaacctgaaaagtaggaagcagaagaaaaaagacaagctaggaaacaaaaagctaagggcaaaatgtacaaacttagaagaatttggaaggccttaaatatagtagcttagtttgaaaaatgtgaaggactttcgtaacggaagtaattcaagatcaagagtaattaccaacttaatgtttttgcattggactttgagttaagattattttttaaatcctgaggactagcattaattgacagctgacccaggtgctacacagaagtggattcagtgaatctaggaagacagcagcagacaggattccaggaaccagtgtttgatgaagctaggactgaggagcaagcgagcaagcagcagttcgtggtgaagataggaaaagagtccaggagccagtgcgatttggtgaaggaagctaggaagaaggaaggagcgctaacgatttggtggtgaagctaggaaaaaggattccaggaaggagcgagtgcaatttggtgatgaaggtagcaggcggcttggcttggcaaccacacggaggaggcgaccaggctttgtgcgtagaggatcctagaccagcatgccagtgtgccaaggccacagggaaagcgagtggttggtaaaaatccgtgaggtcggcaatatgttgtttttctgggacttacttatggtaaccttttatttattttctaatataatgggggagtttcgtactgaggtgtaaagggatttatattggggacgtaggccgatttccgggtgttgtaggtttctctttttcaggcttatactcatgaatcttgtctgaagcttttgagggcagactgccaagtcctggagaaatagtagatggcaagtttgtgggtttttttttttttacacgaatttgaggaaaaccaaatgaatttgatagccaaattgagacaatttcagcaaatctgtaagcagtttgtatgtttagttggggtaatgaagtatttcagttttgtgaatagatgacctgtttttacttcctcaccctgaattcgttttgtaaatgtagagtttggatgtgtaactgaggcgggggggagttttcagtatttttttttgtgggggtgggggcaaaatatgttttcagttctttttcccttaggtctgtctagaatcctaaaggcaaatgactcaaggtgtaacagaaaacaagaaaatccaatatcaggataatcagaccaccacaggtttacagtttatagaaactagagcagttctcacgttgaggtctgtggaagagatgtccattggagaaatggctggtagttactcttttttccccccacccccttaatcagactttaaaagtgcttaaccccttaaacttgttattttttacttgaagcattttgggatggtcttaacagggaagagagagggtgggggagaaaatgtttttttctaagattttccacagatgctatagtactattgacaaactgggttagagaaggagtgtaccgctgtgctgttggcacgaacaccttcagggactggagctgcttttatccttggaagagtattcccagttgaagctgaaaagtacagcacagtgcagctttggttcatattcagtcatctcaggagaacttcagaagagcttgagtaggccaaatgttgaagttaagttttccaataatgtgacttcttaaaagttttattaaaggggaggggcaaatattggcaattagttggcagtggcctgttacggttgggattggtggggtgggtttaggtaattgtttagtttatgattgcagataaactcatgccagagaacttaaagtcttagaatggaaaaagtaaagaaatatcaacttccaagttggcaagtaactcccaatgatttagtttttttccccccagtttgaattgggaagctgggggaagttaaatatgagccactgggtgtaccagtgcattaatttgggcaaggaaagtgtcataatttgatactgtatctgttttccttcaaagtatagagcttttggggaaggaaagtattgaactgggggttggtctggcctactgggctgacattaactacaattatgggaaatgcaaaagttgtttggatatggtagtgtgtggttctcttttggaatttttttcaggtgatttaataataatttaaaactactatagaaactgcagagcaaaggaagtggcttaatgatcctgaagggatttcttctgatggtagcttttgtattatcaagtaagattctattttcagttgtgtgtaagcaagttttttttttagtgtaggagaaatacttttccatggtttaactgcaaaacaagatgttaaggtatgcttcaaaaattttgtaaattgtttattttaaacttatctgtttgtaaattgtaactgattaagaattgtgatagttcagcttgaatgtctcttagagggtgggcttttgttgatgagggaggggaaactttttttttctatagacttttttcagataacatcttctgagtcataaccagcctggcagtatgatggcctagatgcagagaaaacagctccttggtgaattgataagtaaaggcagaaaagattatatgtcatacctccattggggaataagcataaccctgagattcttactactgatgagaacattatctgcatatgccaaaaaaattttaagcaaatgaaagctaccaatttaaagttacggaatctaccattttaaagttaattgcttgtcaagctataaccacaaaaataatgaattgatgagaaatacaatgaagaggcaatgtccatctcaaaatactgcttttacaaaagcagaataaaagcgaaaagaaatgaaaatgttacactacattaatcctggaataaaagaagccgaaataaatgagagatgagttgggatcaagtggattgaggaggctgtgctgtgtgccaatgtttcgtttgcctcagacaggtatctcttcgttatcagaagagttgcttcatttcatctgggagcagaaaacagcaggcagctgttaacagataagtttaacttgcatctgcagtattgcatgttagggataagtgcttatttttaagagctgtggagttcttaaatatcaaccatggcactttctcctgaccccttccctaggggatttcaggattgagaaatttttccatcgagcctttttaaaattgtaggacttgttcctgtgggcttcagtgatgggatagtacacttcactcagaggcattgcatcttaaataatttctta

SEQ ID NO: 11 - DNA, 1240 bp, Homo sapiens
  misc_feature: Incyte ID No: 999585.16
tttttttttcctgcctcaggtttatttgtacaaatagcacaggaggaccccagccccatgcagatggtagcccaggggcgggggtggggggtcgcaccagtccttctgtcctcatgttggcagagatatctactctgaagcctttgtaggggcctgggtacgtttgggagcctgagctggaactgaagctggggctgcagcctgggccttggtttgatccttggccttggcttggccttggccttggcctttggccggcacagcctgagccccttggcaatacgggcacgagcacgcttcccaagcttggggtgggcaatgtaggcaagtcgatcgagcttgcggctgacaccctttgggatcttgggcttaacctccttgggctttacgagggccttgatagcctcggcacgtgcactcatggccttggcattgttggcctgcatcttctttaggccctttttgttgtgcttcttggcaaagcgcatgttcctcaggaacttggggtccacccccttaagaaattcgtatctttgtgatcggggtttcttgataccatttctgtgccatttttcgggactggttgtgtgtggtgtggttcttggacatggccaagtctgcaccataagccgcggctcccgaaaatggcacagaaatggtatcaagaaaccccgatcacaaagatacgaatctcttaagggggtggaccccaagttcctgaggaacatgcgctttgccaagaagcacaacaaaagggcctaaagaagatgcaggccaacaatgccaaggccatgagtgcacgtgccgaggctatcaaggccctcgtaaagcccaaggaggttaagcccaagatcccaaagggtgtcagccgcaagctcgatcgacttgcctacattgcccaccccaagcttgggaagcgtgctcgtgcccgtattgccaaggggctcaggctgtgccggccaaaggcaaggccaaggccaaggccaaggccaaggatcaaaccaaggcccaggctgcagccccagcttcagttccagctcaggctcccaaacgtacccaggcccctacaaaggcttcagagtagatatctctgccaacatgaggacagaaggactggtgcgaccccccacccccgccctgggctaccatctgcatggggctggggtcctcctgtgctatttgtacaaataaacctgaggcaggatttgttagcctctgtctatgatcctgggaaaaaaaa

SEQ ID NO: 12 - DNA, 1038 bp, Homo sapiens
  misc_feature: Incyte ID No: 1378166CB1
  unsure 11, 15, 17, 20, 25, 27-28, 38, 45-46, 51, 55-56, 68, 70-71, 73, 81,83-84, 97, 105-106, 116, 151-152, 156, 162, 170, 173, 183, 189-190, 197, 207,229-230, 235-236, 238-240, 243, 251-253, 258, 276, 288, 291, 296, 306-307,312, 332, 337, 344, 351, 369, 381-382: a, t, c, g, or other
tttttcctttncaangnccnttttnannttttgggggnccccccnnggggntttnnaaaattttgggntnntntttttttncnnaaaaatttttttnccccccgnnttttttttanccccaaattttttttacccccttttaaaatttttnnccanttcccnccaatttnaanggggtccccnaaattnntttgggnaaagggcccntttcgggttttggggacccccnnggggnncnnnttntttcgggnnnctccnaaaaaaagcctttttttnccccattttttnggnaaaanatttttcctnnccctntaaaaccctttttttagggnccccngggtacnttttggnaaccttaaacttggaaanttaaacttgggnnttcaactttttttttttttttttcctgcctcaggtttatttgtacaaatagcacaggaggaccccagccccatgcagatggtagcccaggggcgggggtggggggtcgcaccagtccttctgtcctcatgttggcagagatatctactctgaagcctttgtaggggcctgggtacgtttgggagcctgagctggaactgaagctggggctgcagcctgggccttggtttgatccttggccttggccttggccttggcctttggccggcacagcctgagccccttggcaatacgggcacgagcacgcttcccaagcttggggtgggcaatgtaggcaagtcgatcgagcttgcggctgacaccctttgggatcttgggcttaacctccttgggctttacgagggccttgatagcctcggcacgtgcactcatggccttggcattgttggcctgcatcttctttaggccctttttgttgtgcttcttggcaaagcgcatgttcctcaggaacttggggtccacccccttaagagattcgtatctttgtgatcggggtttcttgataccatttctgtgccattttcgggactggttgtgtgtggtgtggttcttggacttggccatgtctgcaccataagccgcggctcccgaagcgcc

SEQ ID NO: 13 - DNA, 1411 bp, Homo sapiens
  misc_feature: Incyte ID No: 227638.19
cagcactgacaaatgaagaagaagaatgagtctcagggcaccttcctggagtggccctcgccatccagggaccagcgcgttgcctcccccggcgcttttacatcacatgagcagctgacagcgtatttattatgcctttgctgaaacagttgatgagaaatatgtttcccttcagttttcatttagaagacaaggcgtcgtttgaataacttgcctgatttttcttcctaccgagtagcatttctttttttttcaccatatctttccctaaggcagctccttattctgtaggaattgccaatgttgatgtgttattgttaggtatttatatcattcacagggctgtcagaaatcccgatgatcttgaagcaaggtctcatatgcacttggcaagtgcttttgctggcatcggctttggaaatgctggtgttcatctgtgccatggaatgtcttacccaatttcaggtttagtgaagatgtataaagcaaaggattacaatgtggatcacccactggtgccccatggcctttctgtggtgctcacgtccccagcggtgttcactttcacggcccagatgtttccagagcgacacctggagatggcagaaatactgggagccgacacccgcactgccaggatccaagatgcagggctggtgttggcagacacgctccggaaattcttattcgatctggatgttgatgatggcctagcagctgttggttactccaaagctgatatccccgcactagtgaaaggaacgctgcccccaggaaagggtcaccaagcttgcaccctgtccccagtcagaagaggatctggctgctctgtttgaagcttcaatgaaactgtattaattgtcattttaactgaaagaattaccgctggccattgtagtgctgagagcaagagctgatctagctagggctttgtcttttcatctttgcgcataacttacctgttaccagtataggtgggatatacatttatcttgcaggaaattccccaaagctcagagtccagttccttccataaaacaggctggacaaatgaccactatgttagacccccaggctcgacttcaggggtcagtgttcctgtcccaaaccccacacagaatactctgcctctgtttcatgtagcaaatgagcaaaaactcagtatctatcaaaagtgtaaattatatttcctatgcctagtaattcacttcatgtctaaaaatttatctgatagaaacactagcaccagtacatacagaagcatggcaaggatgtttctggcagcacttttctagataataaaagatttgaaacaaccttaagtattcattattggtatatagatcacttatagtatactagacagtggaatactatggtactgttaataaagatgaagtaaatctcttgg

SEQ ID NO: 14 - DNA, 304 bp, Homo sapiens
  misc_feature: Incyte ID No: 981640.1
  unsure 23: a, t, c, g, or other
tttaacaagatgccccaggtgantcattcatgtttgagaagctctgctttaaatcactaaagcagttactgagtaattactaccatcatgactctgaagagctcctatagccttcaaatgcacctaactctactctaaaggcaaatgtcctcactgggaaatctgatctgctgtttcagagaagtgcagggctacacagtgtcttacactcttatctattgatgtttcttggttttgcctggtaatctgctgcttaaatggattatttgatgacatattgatattaaaacagtcctatttttag

SEQ ID NO: 15 - DNA, 386 bp, Homo sapiens
  misc_feature: Incyte ID No: 475570.1
ctccaaaaaaaaaaaaagaagaggttgagtcagcagggacttgggttccctgtgtgtgaggggggcattcttgcctgccagctgctcccgaggtggccttgagaaggaagaagcaggatgacagagcctgagcagcggaaccagcctgcaccctcccttctggcccagcgacctgggctgtggctgagacaataatgaggccagaagtagccggagcctgtcaggaagggcaggggaggactgtggggtctgggctctgtcgctgtaaccatctgctcccaggctgtgtgcagaaaatggcatttacactattgtgcagctcattctcatgaaatactgccattgttgctaaataaagcttgtgtgctctgaatatagccaagcat

SEQ ID NO: 16 - DNA, 3125 bp, Homo sapiens
  misc_feature: Incyte ID No: 347084.15
gccgctgcagacatttagcgctaggaagatggcgcacccggcaatgttccctcgaaggggcagcggtagtggcagcgcctctgctctcaatgcagcaggtaccggcgtcggtagtaatgccacatcttccgaggattttccgcctccgtcgctgcttcagccgccgccccctgcagcatcttctacgtcgggaccacagcctccgcctccacaaagcctgaacctcctttcgcaggctcagctgcaggcacagcctcttgcgccaggcggaactcaaatgaaaaagaaaagtggcttccagataactagcgttactcctgctcagatctccgctagtatcagctctaacaacagtatagcagaggacactgagagctatgatgatctggatgaatctcacacggaagatctctcttcttcggagatccttgatgtgtcactttccagggctactgacttaggggagcccgaacgcagctcctcagaagagaccctaaataacttccaggaagccgagacacctggggcagtctctcccaaccagccccaccttcctcagcctcatttgcctcaccttccacaacagaatgttgtgatcaatgggaatgctcatccacaccacctccatcaccaccatcagattcatcatgggcaccacctccaacatggtcaccaccatccatctcatgttgctgtggccagtgcatccattactggtgggccaccctcaagcccagtatctagaaaactctctacaactggaagctctgacagtatcacaccagttgcaccaacttctgctgtatcatccagtggttcacctgcatctgtaatgactaatatgcgtgctccaagtactacaggtggaataggtataaattctgttactggcactagtacagtaaataatgttaacattactgctgtgggtagttttaatcctaatgtgacaagcagcatgcttggtaatgttaatataagtacaagcaatattcctagtgctgctggtgtgagtgttgggcctggagttaccagtggtgttaatgtgaatatcttgagtggcatgggcaatggtactatttcttcctctgctgctgttagcagtgttcctaatgcagctgcagggatgactgggggatcggtttcaagtcagcagcaacaaccaacagttaacacttcgaggttcagagttgtgaagttagattctagttctgagccctttaaaaaaggtagatggacttgcactgagttctatgaaaaagaaaatgctgtacctgctacagaaggtgtgctgataaataaagtggtggagactgtaaagcaaaatccgatagaagtgacttctgaaagggagagcactagtgggagttcagtgagcagtagtgtcagcacactgagtcactatacagagagtgtgggaagtggagagatgggagcccctactgtggtggtgcagcagcagcagcagcaacaacgactactacagcaacaaccagctctccaaggtgtgaccctccaacagatggattttggtagcactggtccacagagtattccagcagttagtataccacagagtatttctcagtcacagatctcacaagtacaattacagtctcaagaactgagctatcagcaaaagcaaggtcttcagccagtacctctgcaagccactatgagtgctgcaactggtatccagccatcgcctgtaaatgtggttggtgtaacttcagctttaggtcagcagccttccatttccagtttggctcaaccccagctaccatattctcaggcggctcctccagtgcaaactccccttccaggggcaccaccaccccaacagttacagtatggacaacagcaaccaatggtttctacacagatggccccaggccatgtcaaatcagtgactcaaaatcctgcttcagagtatgtacaacagcagccaattcttcaaacagcaatgtcctccggacagcccagttctgcaggagtaggagcaggaacaacagtgattcctgtggctcagccacagggtatccagctgccagtgcagcccacagcagtcccagcacaacctgcaggggcatctgtccagcctgttggccaggctccggcagcagtgtctgctgtacctactggcagtcagattgcaaatattggtcagcaagcaaacatacctactgcagtgcagcagccctctacccaggttccaccttcagttattcagcagggtgctcctccatcttcgcaagtggttccacctgctcaaactgggattattcatcagggagttcaaactagtgctccaagccttcctcaacaattggttattgcatcccaaagttccttgttaactgtgcctccccagccacaaggagtagaaccagtagctcaaggaattgtttcacagcagttgcctgcagttagttctttgccctctgctagtagtatttctgttacaagtcaggttagttcaactggtccttctggaatgccttctgccccaacaaacttggttccaccacaaaatatagcacaaacccctgctacccaaaatggtaatttggttcaaagtgttagtcaacctcccttgatagcaactaatacaaatttgcctttggcacaacagataccactaagttctacccagttctccgcacaatcattagctcaggcaattggaagccaaattgaagatgccaggcgtgcagcggagccctccttagttggcttacctcagactatcagtggtgacagtgggggaatgtcagcagtttcagatgggagtagcagcagcctagcagcctctgcttctcttttcccgttgaaggtgctaccgctgacgacacccctggtggatggcgaggatgagagctcctctggtgcaagtgtggtagctattgacaacaaaatcgagcaagctatggatctagtgaaaagccatttgatgtatgcggtcagagaagaagtggaggtcctcaaagagcaaatcaaagaactaatagagaaaaattcccagctggagcaggagaacaatctgctgaagacactggccagtcctgagcagcttgcccagtttcagggcccagctgcagactggctccccccctgccaccacccag

SEQ ID NO: 17 - DNA, 8911 bp, Homo sapiens
  misc_feature: Incyte ID No: 994247.2
  unsure 374: a, t, c, g, or other
caacagcgcccgacagcccccgatagcccaaaccgcggccctagccccggccgcacccccagccccgccagcatgatgaacaacagcggctactcagacgccggcctcggcctgggcgatgagacagacgagatgccgtccacggagaaggacctggcggaggacgcgccgtggaagaagatccagcagaacacattcacgcgctggtgcaatgagcacctcaagtgcgtgggcaagcgcctgaccgacctgcagcgcgacctcagcgacgggctccggctcatcgcgctgctcgaggtgctcagccagaagcgcatgtaccgcaagttccatccgcgccccaacttccgccaaatgaagctggagaacgtgtntgtggccctcgagttcctcgagcgcgagcacatcaagctcgtgtccatagacagcaaggccatcgtggatgggaacctgaagctgatcctgggcctgatctggacgctgaccctgcactactccatctccatgcccatgtgggaggatgaagatgatgaggatgcccgcaaacagacgcccaagcagcggctgcttggctggatccagaacaaggtgccccagctgcccatcaccaacttcaaccgtgactggcaggacggcgaagctctgggcgcccaggtggacaactgcgcccccggtctctgccccgactgggaggcctgggaccccaaccagcccgtggagaacgcccgggaggccatgcagcaggccgacgactggcttggggtgcccctggtcattgcccctgaggagattgtggaccccaacgtggatgagcattctgttatgacctacctgtcccagttccccaaggccaagctcaaacctggtgcccctgttcgatccaagcagctgaaccccaagaaagccatcgcctatgggcctggcatcgagccacagggcaacaccgtgctgcagcctgcccacttcaccgtgcagacggtggacgcgggcgtgggcgaggtgctggtctacatcgaggaccctgaaggccacaccgaggaggctaaggtggttcccaacaatgacaaggatcgcacctatgctgtctcctatgtgcccaaggtcgctgggttacacaaggtgaccgtgctctttgctggccagaacattgaacgcagtccctttgaggtgaacgtgggcatggccctgggagatgccaacaaggtgtcagcccgtggccctggcctggaacctgtgggcaatgtggccaacaaacccacctactttgacatctacactgcgggggccggcactggcgatgttgctgtggtgatcgtggacccacagggccggcgggacacagtggaggtggccctggaggacaagggtgacagcacgttccgctgcacatacagacctgccatggaggggccacataccgtgcatgtggcctttgcgggtgcccccatcacccgcagtcccttccctgtccatgtgtcggaagcctgtaaccccaacgcctgccgcgcctctgggcgaggcccgcagcccaagggtgttcgcgtgaaagaggtggctgacttcaaggtgtttaccaagggtgccggcagcggggagctcaaggtcacggtcaaggggccaaagggcacagaggagccagtgaaggtgcgggaggctggggatggtgtgttcgagtgcgagtactacccggtggtgcctgggaagtatgtggtgaccatcacgtggggcggctacgccatccctcgcagcccctttgaggtacaggtgagcccagaggcaggagtgcaaaaggtccgggcctggggtcctggtttggagactggccaggtgggcaagtcagccgattttgtggtggaagccattggcaccgaggtggggacactgggcttctccatcgaggggccctcacaagccaagatcgaatgtgacgacaagggggatggctcctgcgatgtgcggtactggcccacggagcctggggagtacgctgtgcacgtcatctgtgacgatgaggacatccgagactcacccttcattgcccacatcctgcccgccccacctgactgcttcccagataaggtgaaggcctttgggcctggcctggagcctaccggctgcatcgtggacaagcccgctgagttcaccattgatgctcgtgcagctggcaagggagacctgaagctctatgcccaggacgccgacggctgtcccatcgacatcaaggtgatccccaacggcgacggcaccttccgctgctcctacgtgcccaccaagcccattaagcacaccatcatcatctcctggggaggcgtaaacgtgcccaagagccccttccgggtgaacgtgggcgagggcagccaccccgagcgggtaaaggtgtacggccccggagtggagaagacaggcctcaaggccaatgagcccacctacttcacggtggactgcagcgaggcggggcaaggcgacgtgagcatcggcatcaagtgcgccccaggcgtggtgggccctgcagaggctgacattgacttcgacatcatcaagaatgacaacgacaccttcaccgtcaagtacacgccaccaggggcgggccgctacaccatcatggtgctgtttgccaaccaggagatccccgccagccccttccacatcaaggtggacccatcccacgatgccagcaaagtcaaggccgagggccctgggctgaatcgcacaggtgtggaagtcgggaagcccacccacttcacggtgctgaccaagggagccggcaaggccaagctggatgtgcagtttgcagggacagccaagggcgaggttgtgcgggactttgagatcatagacaaccatgactactcctacactgtcaagtacaccgctgtccagcagggcaacatggcagtgacagtgacttatggcggggaccctgtccccaagagcccctttgtggtgaatgtggcacccccgctggacctcagcaaaatcaaagttcagggccttaatagcaaggtggctgtgggacaggaacaagcattctctgtgaacacacgaggggctggcggtcagggccaactggatgtgcggatgacttcgccctctcgccggcccatcccctgcaagctggagccaggctggtggagcggaagcccaggctgtgcgctacatgcccccggaggaggggccctacaaggtggatatcacctacgatggtcacccggtgcctggcagcccgtttgctgtggagggtgtcctgccccctgatccctccaaggtctgtgcttatggcccgggtctcaagggtggactggtaggcacccccgcgccattctccatcgacaccaagggggctggcacaggtggcctggggctgaccgtagagggcccctgcgaggccaagatcgagtgccaggacaatggtgatggctcatgtgctgtcagctacctgcccacggagcctggcgagtacaccatcaacatcctgtttgctgaggcccacatccctggctcgcccttcaaagccaccattcggcctgtgtttgacccgagcaaggtgcgggccagtggaccgggcctggagcgcggcaaggtcggtgaggcagccaccttcactgtggactgctcagaggcaggcgaggcggagctgaccattgagatcctgtcggatgccggggtcaaggccgaggtgctgatccacaacaacgcggatggcacctaccacatcacctacagccctgccttccctggcacctacaccattaccatcaagtatggcgggcatcccgtgcccaaattccccacccgtgtccatgtgcagcctgcggtcgataccagtggcgtcaaggtctcagggcctggtgttgagccacacggtgtcctgcgggaggtgaccactgagttcactgtggatgcaagatccctaacagccacaggcggcaaccacgtgacggctcgtgtgctcaacccctcgggggccaagacagacacctatgtgacagacaatggggacggcacctaccgagtgcagtacaccgcctacgaggagggcgtgcatctggtggaggtcctgtatgatgaggtcgctgtgcccaagagccccttccgagtgggcgtgaccgagggctgtgatcccacccgcgtccgagccttcgggccaggcctggagggtggcttggtcaacaaggccaaccgattcactgtggagaccaggggagcgggcaccgggggccttggcctagccatcgagggtccctcggaagccaagatgtcctgcaaggacaacaaggatggtagctgcaccgtggagtacatccccttcactcctggagactatgacgtcaacatcaccttcggggggcggcccattcccagggagcccgttccgcgtgccagtgaaggatgtggtggaccctgggaaggtgaagtgctcagggccagggctgggggctggtgtcagggcccgggttcctcagaccttcacagtggactgcagtcaagctggccgggcgcccctgcaggtggctgtgctgggccccacaggtgtggccgagcctgtggaggtgcgggacaatggagatggcacccacactgtccactacaccccagccactgacgggccctacacggtagccgtcaagtatgctgaccaggaggtgccacgcagccccttcaagatcaaggtcctcccagctcatgatgccagcaaggtgcgggccagcggcccaggcctcaacgcctctggcatccctgccagcctgcctgtggagttcaccatcgacgcacgggacgcgggcgaggggttgctcactgtccagatcttggaccccgagggtaagcccaagaaggccaacatccgggacaatggggatggcacgtacactgtgtcctacctgccggacatgagcggccggtacaccatcaccatcaagtatggcggtgatgagatcccctactcgcccttccgcatccatgctctgcccactggggatgccagcaagtgcactgtcacagtgtccattggaggccatggcctgggtgcctgcctgggccctcgaatccagattgggcaggagacggtgatcacggtggatgccaaggcagccggtgaggggaaggtgacatgcacggtgtccacgccggatggggcagagctcgatgtggatgtggttgagaaccatgacggtacctttgacatctactacacagcgcccgagccgggcaagtacgtcatcaccatccgcttcgggggtgagcacatccccaacagccccttccacgtgctggccacagaggagccagtggtgcctgtggagccaatggagtccatgctgaggcccttcaacctggtcatccccttcgcggtgcagaaaggggagctcacaggagaggtgcggatgccctcggggaagacggcacggcccaacatcaccgacaacaaggacggcaccatcacggtgaggtatgcacccactgagaaaggcctgcaccagatggggatcaagtatgacggcaaccacatccctgggagccccttacagttctatgtggatgccatcaacagccgccatgtcagtgcctatgggccaggcctgagccatggcatggtcaacaagccagccaccttcactattgtcaccaaagatgctggagaagggggtctgtcactggccgtggagggcccatccaaggcagagatcacctgtaaggacaacaaggatggcacctgcaccgtgtcctatctgccgactgcgcctggagactacagcatcatcgtgcgcttcgatgacaagcacatcccggggagccccttcacagccaagatcacaggtgatgactccatgaggacctcacagctgaatgtgggcacctccacggacgtgtcactgaagatcaccgagagtgatctgagccagctgaccgccagcatccgtgccccctcgggcaacgaggagccctgcctgctgaagcgcctgcccaaccggcacattgggatctccttcacccccaaggaggtcggggagcacgtggtgagcgtgcgcaagagtggcaagcatgtcaccaacagccccttcaagatcctggtggggccatctgagatcggggacgccagcaaggtgcgggtctggggcaaggggctttccgagggacacacattccaggtggcagagttcatcgtggacactcgcaatgcaggttatgggggcttggggctgagtattgaaggcccaagcaaggtggacatcaactgtgaggacatggaggacgggacatgcaaagtcacctactgccccaccgagcccggcacctacatcatcaacatcaagtttgctgacaagcacgtgcctggaagccccttcactgtgaaggtgaccggcgagggccgcatgaaggagagcatcacccggcggagacaggcaccttccatcgccaccatcggcagcacctgtgacctcaacctcaagatcccaggaaactggttccagatggtgtctgcccaggagcgcctgacacgcaccttcacacgcagcagccacacctacacccgcacggagcgcacggagatcagcaagacgcggggcggggagacaaagcgcgaggtgcgggtggaggagtccacccaggtcggcggggaccccttccctgctgtgtttggggacttcctgggccgggagcgcctgggatccttcggcagcatcacccggcagcaggagggtgaggccagctctcaggacatgactgcacaggtgaccagcccatcgggcaaggtggaagccgcagagatcgtcgagggcgaggacagcgcctacagcgtgcgctttgtgccccaggaaatggggccccatacggtcgctgtcaagtaccgtggccagcacgtgcccggcagcccctttcagttcactgtggggccgctgggtgaaggtggtgcccacaaggtgcgggccggaggcacagggctggagcgaggtgtggccggcgtgccagccgagttcagcatctggacccgggaggctggcgctgggggcctgtccattgctgtggagggtcctagcaaagcggagattgcatttgaggatcgcaaagatggctcctgcggcgtctcctatgtcgtccaggaaccaggtgactatgaggtctccatcaagttcaatgatgagcacatcccagacagcccctttgtggtgcctgtggcctccctctcggatgacgctcgccgtctcactgtcaccagcctccaggagacggggctcaaggtgaaccagccagcgtcctttgccgtgcagctgaacggtgcccggggcgtgattgatgcccgggtgcacacaccctcgggggctgtggaggagtgctacgtctctgagctggacagtgacaagcacaccatccgcttcatcccccacgagaatggcgtccactccatcgatgtcaagttcaacggtgcccacatccctggaagtcccttcaagatccgcgttggggagcagagccaggctggggacccaggcttggtgtcagcctacggtcctgggctcgagggaggcactaccggtgtgtcatcagagttcatcgtgaacaccctgaatgccggctcgggggccttgtctgtcaccattgatggcccctccaaggtgcagctggactgtcgggagtgtcctgagggccatgtggtcacttatactcccatggcccctggcaactacctcattgccatcaagtacggtggcccccagcacatcgtgggcagccccttcaaggccaaggtcactggtccgaggctgtccggaggccacagccttcacgaaacatccacggttctggtggagactgtgaccaagtcctcctcaagccggggctccagctacagctccatccccaagttctcctcagatgccagcaaggtggtgactcggggccctgggctgtcccaggccttcgtgggccagaagaactccttcaccgtggactgcagcaaagcaggcaccaacatgatgatggtgggcgtgcacggccccaagaccccctgtgaggaggtgtacgtgaagcacatggggaaccgggtgtacaatgtcacctacactgtcaaggagaaaggggactacatcctcattgtcaagtggggtgacgaaagtgtccctggaagccccttcaaagtcaaggtcccttgaatcccaaaagtgcctccccagcctcagcccccacctccagccacacacacattacacacacacacacacacacaaatgtgccacacccagacacgcacagaatcagacactacaaacacctgccttgggggtgaagtgaaggcccagcctccccaccccagcgcgccccaggggttggaggaccttgtctgtgtcaggacagtgtccctccctgggaatgtgacatgaggccgactggggccaggctcaggggcagaggctgggacacaaggggctggcgagggctgcgaggccagggaagccctgagtttctggcggggctgagcagtgggggagcattgtgttgtgggtgtctgtgtgtgaggtcacccttcaaactgcaccgccggccagataccctcctgaccccgaggacttggtctggtctctctggtggctacaaccccagagttttaaggacttggaaaggaaagcacaatcagagaagaaaacagcccccgaaccagcaggagtggcctggcacatggaccgggcttgagcgatgtgcactccacccaagccaggctcccagggggcctgatttctctctcactgtctctttttttaaaatggttgcatcggctcctccccatggggggccttttttacacactgcgaggcccagctttctaggggacttttgccacatgtcatgcagctcagtctgggacgctgtttagtgtggaaaactccacaaaaaagtgcggctgtcgcagagg

SEQ ID NO: 18 - DNA, 4895 bp, Homo sapiens
  misc_feature: Incyte ID No: 1117326.5
ttaaaaccatgcagcagtcagtttccaagtttgcttgcaatcagtagttttcaagggagcttttaaagctgaactgaaatgtttgaaatgtggaacactcttgaccatgaaatatgttctacttacatgcctcagcctttaaaagttctttgcattagagtcaaggattacattcttcctggagccaagcatggggccagctgtaaacaagccgcatttctccttggggagactgataatttaaaaggtttgttgtgtcagaaacattcccagcttcatcaccaaccctttccttccacctctgcccactggagaccacttacatcccgaagcggacgcggcagctgaagtcaggaaaccatgcatcacattagcaggagccaactgcagactttaaactccgttcaacatgtggatgcggcagagaaatgacctgtccagacaagccggggcagctcataaactggttcatctgctccctgtgcgtcccgcgggtgcgtaagctctggagcagccggcgtccaaggacccggagaaaccttctgctgggcactgcgtgtgccatctacttgggcttcctggtgagccaggtggggagggcctctctccagcatggacaggcggctgagaaggggccacatcgcagccgcgacaccgccgagccatccttccctgagatacccctggatggtaccctggcccctccagagtcccagggcaatgggtccactctgcagcccaatgtggtgtacattaccctacgctccaagcgcagcaagccggccaatatccgtggcaccgtgaagcccaagcgcaggaaaaagcatgcagtggcatcggctgccccaggggcaggaggctttggtcggaccatcccttcagccgcaggaagcggcaagggaagctgatgctgtagcacctgggtacgctcagggagcaaacctggttaagattggagagcgaccctggaggttggtgcggggtccgggagtgcgagccgggggcccagacttcctgcagcccagctccagggagagcaacattaggatctacagcgagagcgccccctcctggctgagcaaagatgacatccgaagaatgcgactcttggcggacagcgcagtggcagggctccggcctgtgtcctctaggagcggagcccgtttgctggtgctggaggggggcgcacctggcgctgtgctccgctgtggccctagcccctgtgggcttctcaagcagcccttggacatgagtgaggtgtttgccttccacctagacaggatcctggggctcaacaggaccctgccgtctgtgagcaggaaagcagagttcatccaagatggccgcccatgccccatcattctttgggatgcatctttatcttcagcaagtaatgacacccattcttctgttaagctcacctggggaacttatcagcagttgctgaaacagaaatgctggcagaatggccgagtacccaagcctgaatcaggttgtactgaaatacatcatcatgagtggtccaagatggcactctttgatttttggttacagatttataatcgcttagatacaaattgctgtggattcagacctcgcaaggaagatgcctgtgtacagaatggattgaggccaaaatgtgatgaccaaggttctgcggctctagcacacattatccagcgaaagcatgacccaaggcatttggtttttatagacaacaagggtttctttgacaggagtgaagataacttaaacttcaaattgttagaaggcatcaaagagtttccagcttctgcagtttctgttttgaagagccagcacttacggcagaaacttcttcagtctctgtttcttgataaagtgtattgggaaagtcaaggaggtagacaaggaattgaaaagcttatcgatgtaatagaacacagagccaaaattcttatcacctatatcaatgcacacggggtcaaagtattacctatgaatgaatgacaaaagaatcttctggctagggtgttagatatatttatgcatttttggttttgtttttaaatcaagcacatcaacctcaagcccgtttagcaatgaggcagtgtagatgaatacgtaaaataaatgactttaaccaagtagctataatgggacttagcactgtatgcatacttaaaaaggttttgaaaaacaaactacttgagaaatatttgtttatatttttctctaacatcatgctatgtgtcagtctgaacatctgacaacagaaatttcagttattattctagctaagttttgaaaacatttgtcatgctgtttaatagaaaactgcaaaccagagatactgactccattaataaaccatattttgtgccgttttgactgttctgaccaaatactaatgggaacaattcttgacgtttttctgttgctgattgttaacatagagcagtctctacactaccctgaggcaactctacattggaacactgaggcttacagcctgcaagagcatcagagctgaccatacatttaaacagaaatgctggtttatttgcaaaatcaccagtatattttctattgtgtctataaaaaatcagtcatttaagtacaagaatcatattttccattcctttttagaaatttattttgttgtccctatggaaatcattcacatctgacaatttatatgttaaagagttttactctctctattttggtccaatttgtatctagtggctgagaaattaaataattctaaagtatgaagttacctatctgaaaatgtacttacagagtatcattttaaaatggatgtctctttaaaaattttgttacttttaccaacaatgtaatataatttatgtatattttattaataatagtgaattccttaaaatttgttctatgtacttatatttaatttgatttaatggttactgcccagatattgagaaatggttcaaatattgagtgtgtttcaatatattatctggcttatttcaacatgagtaatatgagcaaaataagttaaaacctgcgtctgatcaattttcctcatgactagaactaaaacagtaaatttggacaatattaagcctcaaataatcatctccaaactccttctaacactttttaaatcagattggaagacatggacaaatcaggttcatgtgttgcatctttatgtcctttgccaatatccaagatcatcacatatggtagatattcacatggagtttcaaattcagaatagattaccattaccttcctgcccttacacatcctactccttatttaaaagttctatttgtgacttttcatttcctgaaagtttaaaaatacaatttgagaatgtttataatacattctctcctgtcttttcacggttacgtctgttattgctgaaatacaccacattttctttgttctggtcaaggttaactcaatatctgtgtgaaagagaactactaacaacgttacaatagaggctagatttgaaaaaaaaaatctatagatctaattgatacaattgtagaacaaaatgtcaaaataatgttttaagtataagagaagatggaccaaggagagagagatcatttgaaaatctaattgtagcttttctaggctcacattcatgtactacttttagcacccttatgggctgtgctcgccccctggacagttgagctttggattatcttcctcttcaattttccctctattgacccgagtgtctccctctgcttctacagatttatagtactccttggctcttttgagtctccacttttactcactgtctctgggatttttaagatccttttcttctcttataaatcatcctcttaatgaaaattagcctaacaaaagtttggagactggaatcctactttgagccactgacttgaaataactcttttggcaagttgcctgacatcctgtcttaccaaggtggcatatttgcatttttactgcttaaaacattttttcttttttaccatctttatccaaatttatcatattgatggtaggactaacaggctttttagaagctggctttaactttgagtctcaagctacaatgctgttgggcagcctggtcttcccacgtgagggtttaactttgtttatttgcctccagttattccaaaatgcttattaaatgaaaggcccaggaacatgtttattttagtcacctttgctttttaacaattttgttttgtaatcaatgagtaattcatgatgaattatttttgactaatggatagccgaaggccaagcttttaattctaataggtaatgttcttcttttgtcttattgaaacaatgagaatactctgtgcatttcaaatgcactccgattatgctgtggttttattcacataagcacaatatgtgttttatttataacttcataacaaacttataatataataatttaccttagcagacatgcaaaagcttattcttgtgtgacttactttctttaagctaataatataaaaataaatatgtatcttaaaaatctataataaaacattagaaattaaagatatgtgctttttattttgcagatgagttcatttgcttctgtagatgtgttttcagagctaggtacagaggaatgtttgctacctttagcggtgaaaaaagaaagagagtcaagaattttgttggattgtgtttgtgtgtgcatatatttgatatcatcattatatttgtaatctttggacttgtaatcatagcctgtttattctactgtgccattaaatatactttaccttatacataacgaataaaatacctagatgtagatttatttacacactgtctatgaaattctatgtttatgtcagcacagaacaagcacacatttagagcatcatctgaaaattatatggaaa

SEQ ID NO: 19 - DNA, 2234 bp, Homo sapiens
  misc_feature: Incyte ID No: 111552CB1
gggaagagagatctgcagactcccagggaacctacagctttctccttcacagcattgcaggagatggtgtctcgctcttttgcccaggctggactgcagtggcacaacctcagctcattgcggcctccgcctcctgggctcaagcgattctcctgcgtctgcctcccaagtagttgggactacaggagccgaatcagaaatgtcatcctcaggcacgccagacttacctgtcctactcaccgatttgaagattcaatatactaagatcttcataaacaatgaatggcatgattcagtgagtggcaagaaatttcctgtctttaatcctgcaactgaggaggagctctgccaggtagaagaaggagataaggaggatgttgacaaggcagtgaaggccgcaagacaggcttttcagattggatctccgtggcgtactatggatgcttccgagagggggcgactattatacaagttggctgatttaatcgaaagagatcgtctgctgctggcgacaatggagtcaatgaatggtggaaaactctattccaatgcatatctgaatgatttagcaggctgcatcaaaacattgcgctactgtgcaggttgggctgacaagatccagggccgtacaataccaattgatggaaatttttttacatatacaagacatgaacctattggtgtatgtggccaaatcattccttggaatttcccgttggttatgctcatttggaagatagggcctgcactgagctgtggaaacacagtggttgtcaaaccagcagagcaaactcctctcactgctctccacgtggcatctttaataaaagaggcagggtttcctcctggagtagtgaatattgttcctggttatgggcctacagcaggggcagccatttcttctcacatggatatagacaaagtagccttcacaggatcaacagaggttggcaagttgatcaaagaagctgccgggaaaagcaatctgaagagggtgaccctggagcttggaggaaagagcccttgcattgtgttagctgatgccgacttggacaatgctgttgaatttgcacaccatggggtattctaccaccagggccagtgttgtatagccgcatccaggatttttgtggaagaatcaatttatgatgagtttgttcgaaggagtgttgagcgggctaagaagtatatccttggaaatcctctgaccccaggagtcactcaaggccctcagattgacaaggaacaatatgataaaatacttgacctcattgagagtgggaagaaagaaggggccaaactggaatgtggaggaggcccgtgggggaataaaggctactttgtccagcccacagtgttctctaatgttacagatgagatgcgcattgccaaagaggagatttttggaccagtgcagcaaatcatgaagtttaaatctttagatgacgtgatcaaaagagcaaacaatactttctatggcttatcagcaggagtgtttaccaaagacattgataaagccataacaatctcctctgctctgcaggcaggaacagtgtgggtgaattgctatggcgtggtaagtgcccagtgcccctttggtggattcaagatgtctggaaatggaagagaactgggagagtacggtttccatgaatatacagaggtcaaaacagtcacagtgaaaatctctcagaagaactcataaagaaaatacaagagtggagagaagctcttcaatagctaagcatctccttacagtcactaatatagtagattttaaagacaaaatttttcttttcttgatttttttaaacataagctaaatcatattagtattaatactacccatagaaaacttgacatgtagcttcttctgaaagaattatttgccttctgaaatgtgacccccaagtcctatcctaaataaaaaaagacaaattcggatgtatgatctctctagctttgtcatagttatgtgattttcctttgtagctacttttgcaggataataattttatagaaaaggaacagttgcatttagcttctttcccttagtgactcttgaagtacttaacatacacgttaactgcagagtaaattgctctgttcccagtagttataaagtccttggactgttttgaaaagtttcctaggatgtcatgtctgcttgtcaaaagaaataatccatgtaatatttagctataaaatgaatataaagattaataataaacaac

SEQ ID NO: 20 - DNA, 2184 bp, Homo sapiens
  misc_feature: Incyte ID No: 293858.1
ggcatttggagcaaaggcttctgtaagagggagtaggatggaaattgatctttgaagaaagcaagacagaagaagggagatggaaagatgaaatcattttaaaattgctggtaacaaacgaaggagccgaatcagaaatgtcatcctcaggcacgccagacttacctgtcctactcaccgatttgaagattcaatatactaagatcttcataaacaatgaatggcatgattcagtgagtggcaagaaatttcctgtctttaatcctgcaactgaggaggagctctgccaggtagaagaaggagataaggaggatgttgacaaggcagtgaaggccgcaagacaggcttttcagattggatccccgtggcgtactatggatgcttccgagagggggcgactattatacaagttggctgatttaatcgaaagagatcgtctgctgctggcgacaatggagtcaatgaatggtggaaaactctattccaatgcatatctgaatgatttagcaggctgcatcaaaacattgcgctactgtgcaggttgggctgacaagatccagggccgtacaataccaattgatggaaatttttttacatatacaagacatgaacctattggtgtatgtggccaaatcattccttggaatttcccgttggttatgctcatttggaagatagggcctgcactgagctgtggaaacacagtggttgtcaaaccagcagagcaaactcctctcactgctctccacgtggcatctttaataaaagaggcagggtttcctcctggagtagtgaatattgttcctggttatgggcctacagcaggggcagccatttcttctcacatggatatagacaaagtagccttcacaggatcaacagaggttggcaagttgatcaaagaagctgccgggaaaagcaatctgaagagggtgaccctggagcttggaggaaagagcccttgcattgtgttagctgatgccgacttggacaatgctgttgaatttgcacaccatggggtattctaccaccagggccagtgttgtatagccgcatccaggatttttgtggaagaatcaatttatgatgagtttgttcgaaggagtgttgagcgggctaagaagtatatccttggaaatcctctgaccccaggagtcactcaaggccctcagattgacaaggaacaatatgataaaatacttgacctcattgagagtgggaagaaagaaggggccaaactggaatgtggaggaggcccgtgggggaataaaggctactttgtccagcccacagtgttctctaatgttacagatgagatgcgcattgccaaagaggagatttttggaccagtgcagcaaatcatgaagtttaaatctttagatgacgtgatcaaaagagcaaacaatactttctatggcttatcagcaggagtgtttaccaaagacattgataaagccataacaatctcctctgctctgcaggcaggaacagtgtgggtgaattgctatggcgtggtaagtgcccagtgcccctttggtggattcaagatgtctggaaatggaagagaactgggagagtacggtttccatgaatatacagaggtcaaaacagtcacagtgaaaatctctcagaagaactcataaagaaaatacaagagtggagagaagctcttcaatagctaagcatctccttacagtcactaatatagtagattttaaagacaaaatttttcttttcttgatttttttaaacataagctaaatcatattagtattaatactacccatagaaaacttgacatgtagcttcttctgaaagaattatttgccttctgaaatgtgacccccaagtcctatcctaaataaaaaaagacaaattcggatgtatgatctctctagctttgtcatagttatgtgattttcctttgtagctacttttgcaggataataattttatagaaaaggaacagttgcatttagcttctttcccttagtgactcttgaagtacttaacatacacgttaactgcagagtaaattgctctgttcccagtagttataaagtccttggactgttttgaaaagtttcctaggatgtcatgtctgcttgtcaaaagaaataatccctgtaatatttagctgtaaactgaatataaagcttaataaaaacaaccttgcatgataaa

SEQ ID NO: 21 - DNA, 1342 bp, Homo sapiens
  misc_feature: Incyte ID No: 203446.7
ctcacaaccactgctccttctccccagccttccagccctggtgtttcccatcgggggccatgtggcctggaacacagaggctgggctgcccaaggacaggccccctggcctacaaaaaggacagtcttatcacagatgtgcaatccttggcacttccctgtggcgtctgcagttctgagactgattttcttctataaatgtgaaaagataggggatgataggaaacccggatataaggcagcaccctgccgcttcctctgcctaggcgacgagacccagtggctagaagttcaccatgtctattctcaagatcccatgccagggagatctttgactctcgcgggaatcccactgttgaggttgatctcttcacctcaaaaggtctcttcagagctgctgtgcccagtggtgcttcaactggtatctatgaggccctagagctccgggcacaatgataagactcgctatatggggaagggtgtctcaaaggctgttgagcacatcaataaaactattgcgcctgccctggttagcaagaaactgaacgtcacagaacaagagaagattgacaaactgatgatcgagatggatggaacagaaaaaaaatctaagtttggtgcgaacgccattctgggggtgtcccttgccgtctgcaaagctggtgccgttgagaagggggtccccctgtaccgccacatcgctgacttggctggcaactctgaagtgcatcctgccagtcccggcgttcaatgtcatcaatggcggttctcatgctggcaacaagctggccatgcaggagttcatgatcctcccagttcggtgcagcaaacttcagggaagccatgcgcattggagcagaggtttaccacaacctgaagaatgtcatcaaggagaaatatgggaaagatgccaccaatgtgggggatgaaggcgggtttgctcccaacatcctggagaataaagaaggcctggagctgctgaagactgctattgggaaagctggctacactgataaggtggtcatcggcatggacgtagcggcctccgagttcttcaggtctgggaagtatgacctggacttcaagtctcccgatgaccccagcaggtacatctcgcctgaccagctggctgacctgtacaagtccttcatcaaggactacccagtggtgtctatcgaagatccctttgaccaggatgactggggagcttggcagaagttcacagccagtgcaggaatccaggtagtgggggatgatctcacagtgaccaacccaaagaggatcgccaaggccgtgaacgagaagtcctgcaactgcctcctgctcaaagtcaaccagattgg

SEQ ID NO: 22 - DNA, 5432 bp, Homo sapiens
  misc_feature: Incyte ID No: 1383093.13
gtgtcccatagtgtttccaaacttggaaagggcgggggagggcgggaggatgcggagggcggaggtatgcagacaacgagtcagagtttccccttgaaagctcaaaagtgtccacgtcctcaaaaagaatggaaccaatttaagaagccagccccgtggccacgtcccttccgcccattcgctccctcctctgcgcccccgcaggctcctcccagctgtggctgcccgggcccccagccccagccctcccattggtggaggcccttttggaggcaccctagggccagggaaacttttgccgtataaatagggcagatccgggctttattattttagcaccacggcagcaggaggtttcggctaagcttggaggtactggccacgactgcatgcccgcgcccgccaggtgatacctccgccggtgacccaggggctctgcgacacaaggagtctgcatgtctaagtgctagacatgctcagctttgtggatacgcggactttgttgctgcttgcagtaaccttatgcctagcaacatgccaatctttacaagaggaaactgtaagaaagggcccagccggagatagaggaccacgtggagaaaggggtccaccaggccccccaggcagagatggtgaagatggtcccacaggccctcctggtccacctggtcctcctggcccccctggtctcggtgggaactttgctgctcagtatgatggaaaaggagttggacttggccctggaccaatgggcttaatgggacctagaggcccacctggtgcagctggagccccaggccctcaaggtttccaaggacctgctggtgagcctggtgaacctggtcaaactggtcctgcaggtgctcgtggtccagctggccctcctggcaaggctggtgaagatggtcaccctggaaaacccggacgacctggtgagagaggagttgttggaccacagggtgctcgtggtttccctggaactcctggacttcctggcttcaaaggcattaggggacacaatggtctggatggattgaagggacagcccggtgctcctggtgtgaagggtgaacctggtgcccctggtgaaaatggaactccaggtcaaacaggagcccgtgggcttcctggtgagagaggacgtgttggtgcccctggcccagctggtgcccgtggcagtgatggaagtgtgggtcccgtgggtcctgctggtcccattgggtctgctggccctccaggcttcccaggtgcccctggccccaagggtgaaattggagctgttggtaacgctggtcctgctggtcccgccggtccccgtggtgaagtgggtcttccaggcctctccggccccgttggacctcctggtaatcctggagcaaacggccttactggtgccaagggtgctgctggccttcccggcgttgctggggctcccggcctccctggaccccgcggtattcctggccctgttggtgctgccggtgctactggtgccagaggacttgttggtgagcctggtccagctggctccaaaggagagagcggtaacaagggtgagcccggctctgctgggccccaaggtcctcctggtcccagtggtgaagaaggaaagagaggccctaatggggaagctggatctgccggccctccaggacctcctgggctgagaggtagtcctggttctcgtggtcttcctggagctgatggcagagctggcgtcatgggccctcctggtagtcgtggtgcaagtggccctgctggagtccgaggacctaatggagatgctggtcgccctggggagcctggtctcatgggacccagaggtcttcctggttcccctggaaatatcggccccgctggaaaagaaggtcctgtcggcctccctggcatcgacggcaggcctggcccaattggccccgctggagcaagaggagagcctggcaacattggattccctggacccaaaggccccactggtgatcctggcaaaaacggtgataaaggtcatgctggtcttgctggtgctcggggtgctccaggtcctgatggaaacaatggtgctcagggacctcctggaccacagggtgttcaaggtggaaaaggtgaacagggtcccgctggtcctccaggcttccagggtctgcctggcccctcaggtcccgctggtgaagttggcaaaccaggagaaaggggtctccatggtgagtttggtctccctggtcctgctggtccaagaggggaacgcggtcccccaggtgagagtggtgctgccggtcctactggtcctattggaagccgaggtccttctggacccccagggcctgatggaaacaagggtgaacctggtgtggttggtgctgtgggcactgctggtccatctggtcctagtggactcccaggagagaggggtgctgctggcatacctggaggcaagggagaaaagggtgaacctggtctcagaggtgaaattggtaaccctggcagagatggtgctcgtggtgctcctggtgctgtaggtgcccctggtcctgctggagccacaggtgaccggggcgaagctggggctgctggtcctgctggtcctgctggtcctcggggaagccctggtgaacgtggtgaggtcggtcctgctggccccaatggatttgctggtcctgctggtgctgctggtcaacctggtgctaaaggagaaagaggagccaaagggcctaagggtgaaaacggtgttgttggtcccacaggccccgttggagctgctggcccagctggtccaaatggtccccccggtcctgctggaagtcgtggtgatggaggcccccctggtatgactggtttccctggtgctgctggacggactggtcccccaggaccctctggtatttctggccctcctggtccccctggtcctgctgggaaagaagggcttcgtggtcctcgtggtgaccaaggtccagttggccgaactggagaagtaggtgcagttggtccccctggcttcgctggtgagaagggtccctctggagaggctggtactgctggacctcctggcactccaggtcctcagggtcttcttggtgctcctggtattctgggtctccctggctcgagaggtgaacgtggtctaccaggtgttgctggtgctgtgggtgaacctggtcctcttggcattgccggccctcctggggcccgtggtcctcctggtgctgtgggtagtcctggagtcaacggtgctcctggtgaagctggtcgtgatggcaaccctgggaacgatggtcccccaggtcgcgatggtcaacccggacacaagggagagcgcggttaccctggcaatattggtcccgttggtgctgcaggtgcacctggtcctcatggccccgtgggtcctgctggcaaacatggaaaccgtggtgaaactggtccttctggtcctgttggtcctgctggtgctgttggcccaagaggtcctagtggcccacaaggcattcgtggcgataagggagagcccggtgaaaaggggcccagaggtcttcctggcttaaagggacacaatggattgcaaggtctgcctggtatcgctggtcaccatggtgatcaaggtgctcctggctccgtgggtcctgctggtcctaggggccctgctggtccttctggccctgctggaaaagatggtcgcactggacatcctggtacagttggacctgctggcattcgaggccctcagggtcaccaaggccctgctggcccccctggtccccctggccctcctggacctccaggtgtaagcggtggtggttatgactttggttacgatggagacttctacagggctgaccagcctcgctcagcaccttctctcagacccaaggactatgaagttgatgctactctgaagtctctcaacaaccagattgagacccttcttactcctgaaggctctagaaagaacccagctcgcacatgccgtgacttgagactcagccacccagagtggagcagtggttactactggattgaccctaaccaaggatgcactatggatgctatcaaagtatactgtgatttctctactggcgaaacctgtatccgggcccaacctgaaaacatcccagccaagaactggtataggagctccaaggacaagaaacacgtctggctaggagaaactatcaatgctggcagccagtttgaatataatgtagaaggagtgacttccaaggaaatggctacccaacttgccttcatgcgcctgctggccaactatgcctctcagaacatcacctaccactgcaagaacagcattgcatacatggatgaggagactggcaacctgaaaaaggctgtcattctacagggctctaatgatgttgaacttgttgctgagggcaacagcaggttcacttacactgttcttgtagatggctgctctaaaaagacaaatgaatggggaaagacaatcattgaatacaaaacaaataagccatcacgcctgcccttccttgatattgcacctttggacatcggtggtgctgaccaggaattctttgtggacattggcccagtctgtttcaaataaatgaactcaatctaaattaaaaaagaaagaaatttgaaaaaactttctctttgccatttcttcttcttcttttttaactgaaagctgaatccttccatttcttctgcacatctacttgcttaaattgtgggcaaaagagaaaaagaaggattgatcagagcattgtgcaatacagtttcattaactccttcccccgctcccccaaaaatttgaatttttttttcaacactcttacacctgttatggaaaatgtcaacctttgtaagaaaaccaaaataaaaattgaaaaataaaaaccataaacatttgcaccacttgtggcttttgaatatcttccacagagggaagtttaaaacccaaacttccaaaggtttaaactacctcaaaacactttcccatgagtgtgatccacattgttaggtgctgacctagacagagatgaactgaggtccttgttttgttttgttcataatacaaaggtgctaattaatagtatttcagatacttgaagaatgttgatggtgctagaagaatttgagaagaaatactcctgtattgagttgtatcgtgtggtgtattttttaaaaaatttgatttagcattcatattttccatcttattcccaattaaaagtatgcagattatttgcccaaagttgtcctcttcttcagattcagcatttgttctttgccagtctcattttcatcttcttccatggttccacagaagctttgtttcttgggcaagcagaaaaattaaattgtacctattttgtatatgtgagatgtttaaataaattgtgaaaaaaatgaaataaagcatgtttggttttccaaaagaaaaaagaaaaaaaagggcg

SEQ ID NO: 23 - DNA, 2384 bp, Homo sapiens
  misc_feature: Incyte ID No: 2174441CB1
gaaagtgattgattcggatactgacactgtaggatctggggagagaggaacaaaggaccgtgaaagctgctctgtaaaagctgacacagccctcccaagtgagcaggactgttcttcccactgcaatctgacagtttactgcatgcctggagagaacacagcagtaaaaaccaggtttgctactggaaaaagaggaaagagaagactttcattgacggacccagccatggcagcgtagcagccctgcgtttcagacggcagcagctcgggactctggacgtgtgtttgccctcaagtttgctaagctgctggtttattactgaagaaagaatgtggcagattgttttctttactctgagctgtgatcttgtcttggccgcagcctataacaactttcggaagagcatggacagcataggaaagaagcaatatcaggtccagcatgggtcctgcagctacactttcctcctgccagagatggacaactgccgctcttcctccagcccctacgtgtccaatgctgtgcagagggacgcgccgctcgaatacgatgactcggtgcagaggctgcaagtgctggagaacatcatggaaaacaacactcagtggctaatgaagcttgagaattatatccaggacaacatgaagaaagaaatggtagagatacagcagaatgcagtacagaaccagacggctgtgatgatagaaatagggacaaacctgttgaaccaaacagctgagcaaacgcggaagttaactgatgtggaagcccaagtattaaatcagaccacgagacttgaacttcagctcttggaacactccctctcgacaaacaaattggaaaaacagattttggaccagaccagtgaaataaacaaattgcaagataagaacagtttcctagaaaagaaggtgctagctatggaagacaagcacatcatccaactacagtcaataaaagaagagaaagatcagctacaggtgttagtatccaagcaaaattccatcattgaagaactagaaaaaaaaatagtgactgccacggtgaataattcagttcttcaaaagcagcaacatgatctcatggagacagttaataacttactgactatgatgtccacatcaaactcagctaaggaccccactgttgctaaagaagaacaaatcagcttcagagactgtgctgaagtattcaaatcaggacacaccacaaatggcatctacacgttaacattccctaattctacagaagagatcaaggcctactgtgacatggaagctggaggaggcgggtggacaattattcagcgacgtgaggatggcagcgttgattttcagaggacttggaaagaatataaagtgggatttggtaacccttcaggagaatattggctgggaaatgagtttgtttcgcaactgactaatcagcaacgctatgtgcttaaaatacaccttaaagactgggaagggaatgaggcttactcattgtatgaacatttctatctctcaagtgaagaactcaattataggattcaccttaaaggacttacagggacagccggcaaaataagcagcatcagccaaccaggaaatgattttagcacaaaggatggagacaacgacaaatgtatttgcaaatgttcacaaatgctaacaggaggctggtggtttgatgcatgtggtccttccaacttgaacggaatgtactatccacagaggcagaacacaaataagttcaacggcattaaatggtactactggaaaggctcaggctattcgctcaaggccacaaccatgatgatccgaccagcagatttctaaacatcccagtccacctgaggaactgtctcgaactattttcaaagacttaagcccagtgcactgaaagtcacggctgcgcactgtgtcctcttccaccacagagggcgtgtgctcggtgctgacgggacccacatgctccagattagagcctgtaaactttatcacttaaacttgcatcacttaacggaccaaagcaagaccctaaacatccataattgtgattagacagaacacctatgcaaagatgaacccgaggctgagaatcagactgacagtttacagacgctgctgtcacaaccaagaatgttatgtgcaagtttatcagtaaataactggaaaacagaacacttatgttatacaatacagatcatcttggaactgcattcttctgagcactgtttatacactgtgtaaatacccatatgtcctgaattcaccatcactatcacaattaaaaggaagaaaaaaactctctaagccataaaaagacatattcagggatattctgagaaggggttactagaagtttaatatttggaaaaacagttagtgcatttttactc

SEQ ID NO: 24 - DNA, 3251 bp, Homo sapiens
  misc_feature: Incyte ID No: 343965.2
aacagatcggtttttcccagagggtttctgcagcatgggtcctggttggagggcaggcattctgctctgatttttcctgttgcctggctagtgaccccctacaggaagataacggctaagccaggagggcggagcagcccactacacatgtctggctgctcttatcaacttatcatataaggaaaggaaagtgattgattcggatactgacactgtaggatctggggagagaggaacaaaggaccgtgaaagctgctctgtaaaagctgacacagccctcccaagtgagcaggactgttcttcccactgcaatctgacagtttactgcatgcctggagagaacacagcagtaaaaaccaggtttgctactggaaaaagaggaaagagaagactttcattgacggacccagccatggcagcgtagcagccctgcgtttcagacggcagcagctcgggactctggacgtgtgtttgccctcaagtttgctaagctgctggtttattactgaagaaagaatgtggcagattgttttctttactctgagctgtgatcttgtcttggccgcagcctataacaactttcggaagagcatggacagcataggaaagaagcaatatcaggtccagcatgggtcctgcagctacactttcctcctgccagagatggacaactgccgctcttcctccagcccctacgtgtccaatgctgtgcagagggacgcgccgctcgaatacgatgactcggtgcagaggctgcaagtgctggagaacatcatggaaaacaacactcagtggctaatgaagcttgagaattatatccaggacaacatgaagaaagaaatggtagagatacagcagaatgcagtacagaaccagacggctgtgatgatagaaatagggacaaacctgttgaaccaaacagctgagcaaacgcggaagttaactgatgtggaagcccaagtattaaatcagaccacgagacttgaacttcagctcttggaacactccctctcgacaaacaaattggaaaaacagattttggaccagaccagtgaaataaacaaattgcaagataagaacagtttcctagaaaagaaggtgctagctatggaagacaagcacatcatccaactacagtcaataaaagaagagaaagatcagctacaggtgttagtatccaagcaaaattccatcattgaagaactagaaaaaaaaatagtgactgccacggtgaataattcagttcttcagaagcagcaacatgatctcatggagacagttaataacttactgactatgatgtccacatcaaactcagctaaggaccccactgttgctaaagaagaacaaatcagcttcagagactgtgctgaagtattcaaatcaggacacaccacgaatggcatctacacgttaacattccctaattctacagaagagatcaaggcctactgtgacatggaagctggaggaggcgggtggacaattattcagcgacgtgaggatggcagcgttgattttcagaggacttggaaagaatataaagtgggatttggtaacccttcaggagaatattggctgggaaatgagtttgtttcgcaactgactaatcagcaacgctatgtgcttaaaatacaccttaaagactgggaagggaatgaggcttactcattgtatgaacatttctatctctcaagtgaagaactcaattataggattcaccttaaaggacttacagggacagccggcaaaataagcagcatcagccaaccaggaaatgattttagcacaaaggatggagacaacgacaaatgtatttgcaaatgttcacaaatgctaacaggaggctggtggtttgatgcatgtggtccttccaacttgaacggaatgtactatccacagaggcagaacacaaataagttcaacggcattaaatggtactactggaaaggctcaggctattcgctcaaggccacaaccatgatgatccgaccagcagatttctaaacatcccagtccacctgaggaactgtctcgaactattttcaaagacttaagcccagtgcactgaaagtcacggctgcgcactgtgtcctcttccaccacagagggcgtgtgctcggtgctgacgggacccacatgctccagattagagcctgtaaactttatcacttaaacttgcatcacttaacggaccaaagcaagaccctaaacatccataattgtgattagacagaacacctatgcaaagatgaacccgaggctgagaatcagactgacagtttacagacgctgctgtcacaaccaagaatgttatgtgcaagtttatcagtaaataactggaaaacagaacacttatgttatacaatacagatcatcttggaactgcattcttctgagcactgtttatacactgtgtaaatacccatatgtcctgaattcaccatcactatcacaattaaaaggaagaaaaaaactctctaagccataaaaagacatattcagggatattctgagaaggggttactagaagtttaatatttggaaaaacagttagtgcatttttactccatctcttaggtgctttaaatttttatttcaaaaacagcgtatttacatttatgttgacagcttagttataagttaatgctcaaatacgtatttcaaatttatatggtagaaacttccagaatctctgaaattatcaacagaaacgtgccattttagtttatatgcagaccgtactatttttttctgcctgattgttaaatatgaaggtatttttagtaattaaatataacttattaggggatatgcctatgtttaacttttatgataatatttacaattttataatttgtttccaaaagacctaattgtgccttgtgataaggaaacttcttacttttaatgatgaggaaaattatacatttcattctatgacaaagaaactttactatcttctcactattctaaaacagaggtctgttttctttcctagtaagatatatttttatagaactagactacaatttaatttctggttgagaaaagccttctatttaagaaatttacaaagctatatgtctcaagattcacccttaaatttacttaaggaaaaaaataattgacactagtaagtttttttgtgtcaatcagcaaactgaaaaaaaaaaagggtttcaaagtgcaaaaacaaaatctgatgttcataatatatttaaatatttaccaaaaatttgagaacacag

SEQ ID NO: 25 - DNA, 2629 bp, Homo sapiens
  misc_feature: Incyte ID No: 1815622CB1
gtcgcggggtttaggggggttgtgaaaggagagcggcctctcctctatggtcacggggccggggcacgcttcccccactctgtcttgttacttccggtagcgaagcctctccctcttcctctgctcccgcggggtctgtgctgagaataatggcccggttggcccgggacgagtggaatgattaatgatgttttgcagcagttttctacgtctgaaattttttatgtctctggaacccagaatttgctaagagatggaggaacctcagaaaagctatgtgaacacaatggaccttgagagagatgaacctctcaaaagcaccggccctcagatttctgttagtgaattttcttgccactgctgctacgacatcctggttaaccccaccaccttgaactgtgggcacagcttctgccgtcactgccttgctttatggtgggcatcttcaaagaaaacagaatgtccagaatgcagagaaaaatgggaaggtttccccaaagtcagtattctcctcagggatgccattgaaaagttatttcctgatgccattagactgagatttgaagacattcagcagaataatgacatagtccaaagtcttgcagcctttcagaaatatgggaatgatcagattcctttagctcctaacacaggccgagcgaatcagcagaggggagggggattcttttccggtgtgctcacagctttaactggagtggcagtggtcctgctcgtctatcactggagcagcagggaatctgaacacgacctcctggtccacaaggctgtggccaaatggacggcggaagaagttgtcctctggctggagcagctgggcccttgggcatctctttacagggaaaggtttttatctgaacgagtaaatggaaggttgcttttaactttgacagaggaagaattttccaagacgccctataccatagaaaacagcagccacaggagagccatcctcatggagctagaacgtgtcaaagcattaggcgtgaagcccccccagaatctctgggaatataaggctgtgaacccaggcaggtccctgttcctgctatacgccctcaagagctcccccaggctgagtctgctctacctgtacctgtttgactacaccgacaccttcctacctttcatccacaccatctgccctctgcaagaagacagctctggggaggacatcgtcaccaagcttctggatcttaaggagcctacgtggaagcagtggagagagttcctggtcaaatactccttccttccataccagctgattgctgagtttgcttgggactggttggaggtccattactggacatcacggtttctcatcatcaatgctatgttactctcagttctggaattattctccttttggagaatctggtcgagaagtgaactgaagaccgtgcctcagaggatgtggagccatttctggaaagtatcaacgcaggggctttttgtggccatgttctggcccctcatccctcagtttgtttgcaactgtttgttttactgggccctgtactttaacccaattattaacattgatcttgtggtcaaggaactccggcggctggaaacccaggtgttgtgactggcactgcccaggctgagactcttcaagtcccgctgacgtctgagctttgatgcttaagaggggtgaggcagggagcggacttcctattttctaccctcagtaaaacaaggtgctgctttgtatatcaaaagctccaaccatgtcctctccccctcagcctgtgggtggcacgagcaaggactgacatccgcacagggaggattgtctgtttggctgacacagcagcagcccttcccacccagccaccttcctcacagggactaggaggctcagtccccaacggctggcaagactcagggtcctcagtggacatggtgtgggtgacatcagaagggtgccacatcagtcccctccccaacctcagtgactgacagaggatccggatctcagagcctgagaccaggtttattggggcctggcctgtcctctaagtcaagtttaggaaaacaaggataagattctgtcataggcatagagagttgcacataaaaaataccgaagaaaacccaaaattcaatcaacaattctgtcttattgaagagttgctaggattcagagtaaaactcaaaggattcagtttgagcctagaatgatggttagacttgtagtcactgggcttttgttttgctttatggaaatcattgaaggtctggatccctttctctgaatggagagattgagagggatgtcgggcagttcccattagatttagtggccttcatgttattcagaattgttttggtgatacctcacccctgtaatcccagcactttgggtgggtgaggcaggcggatcacttgaagccaggacttcaagaccagcttggccaacatggtgaaacctcatctctactaaaaatacaaaaattagccaagtgtgatggcacatacctgtaatcccagctacttggaattggaaatcgcctgaacccaggaggcggaggttgcagggagggagactgcaccactgcacttcagcctgggtgacagagggagactctgtcttaaaaaaaaaaaaaaa

SEQ ID NO: 26 - DNA, 608 bp, Homo sapiens
  misc_feature: Incyte ID No: 999148.1
aaaagcaaattcttgagcccactgcgcccgacctttttcacttctcttaatgctctgtaaacattaatgtatttatatatgtacttaaaatttttaaaaaattcaatttttatttgagtttataatttaacattacagtaaaaattgcttcccattctttgagttaattctccatgccttttgtgacaagttgtttctgtacccattgccacgaccaccacaattcgaaagagaacatcttcatcatcactcccagaaagggctcctttcattcacttccagaaagggcctcctttgtgcagttgagttacttcccttaggagtttccagcggccgggtgacattgatctgttttcctgtcactgtagatgagatttgtctgttatatacaatttttaaaaattaaatgatatgtatggcttcttttgcttagcataatgtttttgagcttattcatttgttgcatatatcaatactttgcttctttttaccacctgtacttcatttatggatacgttgtttatccatgtgtttatccccaatggacattgggttgtttctgattttttggttattattatgaataaagttgctatgaacattattgt

SEQ ID NO: 27 - DNA, 3659 bp, Homo sapiens
  misc_feature: Incyte ID No: 343991.1
cttttgctttctatagcttcaaaatgttcttaatgttaagacattcttaatactctgaaccatatgaatttgccattttggtaagtcacagacgccagatggtggcaatttcacatggcacaacccgaaagattaacaaactatccagcagatgaaaggattttttttagtttcattgggtttactgaagaaattgtttgaattctcattgcatctccagttcaacagataatgagtgagtgatgccacactctcaagagttaaaaacaaaacaacaaaaaaattaaaacaaaagcacacaactttctctctctgtcccaaaatacatacttgcatacccccgctccagataaaatccaaagggtaaaactgtcttcatgcctgcaaattcctaaggagggcacctaaagtacttgacagcgagtgtgctgaggaaatcggcagctgttgaagtcacctcctgtgctcttgccaaatgtttgaaagggaatacactgggttaccgggtgtatgttgggaggggagcattatcagtgctcgggtgaggcaagttcggagtacccagatggagacatccgtgtctgtgtcgctctggatgcctccaagccagcgtgtgtttactttctgtgtgtgtcaccatgtctttgtgcttctgggtgcttctgtgtttgtttctggccgcgtttctgtgttggacaggggtgactttgtgccggatggcttctgtgtgagagcgcgcgcgagtgtgcatgtcggtgagctgggagggtgtgtctcagtgtctatggctgtggttcggtataagtctgagcatgtctgccagggtgtatttgtgcctgtatgtgcgtgcctcggtgggcactctcgtttccttccgaatgtggggcagtgccggtgtgctgccctctgccttgagacctcaagccgcgcaggcgcccagggcaggcaggtagcggccacagaagagccaaaagctcccgggttggctggtaaggacaccacctccagctttagccctctggggccagccagggtagccgggaagcagtggtggcccgccctccagggagcagttgggccccgcccgggccagccccaggagaaggagggcgaggggaggggagggaaaggggaggagtgcctcgccccttcgcggctgccggcgtgccattggccgaaagttcccgtacgtcacggcgagggcagttcccctaaagtcctgtgcacataacgggcagaacgcactgcgaagcggcttcttcagagcacggggctggaactggcaggcaccgcgagcccctagcacccgacaagctgagtgtgcaggacgagtccccaccacacccacaccacagccgctgaatgaggcttccaggcgtccgctcgcggcccgcagagccccgccgtggggtccgcctgctgaggcgcccccagccagtgcgcttacctgccagactgcgcgccatggggcaacccgggaacggcagcgccttcttgctggcacccaatagaagccatgcgccggaccacgacgtcacgcagcaaagggacgaggtgtgggtggtgggcatgggcatcgtcatgtctctcatcgtcctggccatcgtgtttggcaatgtgctggtcatcacagccattgccaagttcgagcgtctgcagacggtcaccaactacttcatcacttcactggcctgtgctgatctggtcatgggcctggcagtggtgccctttggggccgcccatattcttatgaaaatgtggacttttggcaacttctggtgcgagttttggacttccattgatgtgctgtgcgtcacggccagcattgagaccctgtgcgtgatcgcagtggatcgctactttgccattacttcacctttcaagtaccagagcctgctgaccaagaataaggcccgggtgatcattctgatggtgtggattgtgtcaggccttacctccttcttgcccattcagatgcactggtaccgggccacccaccaggaagccatcaactgctatgccaatgagacctgctgtgacttcttcacgaaccaagcctatgccattgcctcttccatcgtgtccttctacgttcccctggtgatcatggtcttcgtctactccagggtctttcaggaggccaaaaggcagctccagaagattgacaaatctgagggccgcttccatgtccagaaccttagccaggtggagcaggatgggcggacggggcatggactccgcagatcttccaagttctgcttgaaggagcacaaagccctcaagacgttaggcatcatcatgggcactttcaccctctgctggctgcccttcttcatcgttaacattgtgcatgtgatccaggataacctcatccgtaaggaagtttacatcctcctaaattggataggctatgtcaattctggtttcaatccccttatctactgccggagcccagatttcaggattgccttccaggagcttctgtgcctgcgcaggtcttctttgaaggcctatgggaatggctactccagcaacggcaacacaggggagcagagtggatatcacgtggaacaggagaaagaaaataaactgctgtgtgaagacctcccaggcacggaagactttgtgggccatcaaggtactgtgcctagcgataacattgattcacaagggaggaattgtagtacaaatgactcactgctgtaaagcagtttttctacttttaaagacccccccccgcccaacagaacactaaacagactatttaacttgagggtaataaacttagaataaaattgtaaaattgtatagagatatgcagaaggaagggcatccttctgccttttttatttttttaagctgtaaaaagagagaaaacttatttgagtgattatttgttatttgtacagttcagttcctctttgcatggaatttgtaagtttatgtctaaagagctttagtcctagaggacctgagtctgctatattttcatgacttttccatgtatctacctcactattcaagtattaggggtaatatattgctgctggtaatttgtatctgaaggagattttccttcctacacccttggacttgaggattttgagtatctcggacctttcagctgtgaacatggactcttcccccactcctcttatttgctcacacggggtattttaggcagggatttgaggagcagcttcagttgttttcccgagcaaagtctaaagtttacagtaaataaattgtttgaccatgccttcattgcacctgtttctccaaaaccccttgactggagtgctgttgcctcccccactggaaaccgcaggtaactacttgtaattactgcccatgacttaatgtagaatgatacaagaatgacatgcacagattgcttaaccctttcatttgcctttgagtctgctgctgcaaagctgcatctctcctgacacttgtgccccaaatcagttctgcctgctcttagtatagctcaactctccctatggttattgttctgtgttgttacctcagaaacactgactcacagaagcggagttaaggggatatgtttttttctctccacgtgcacccaccacccaccttccagttctacttgtttcaaaactgtttatatttctgtcttggccatgtgtttacag

SEQ ID NO: 28 - DNA, 1926 bp, Homo sapiens
  misc_feature: Incyte ID No: 239701.2
gagaaggcagaggaggagggagggagggaaggagcgcggagcccggcccggaagctaggtgagtgtggcatccgagctgagggacgcgagcctgagacgccgctgctgctccggctgagtatctagcttgtctccccgatgggattcccgtccaagctatctcgagcctgcagcgccacagtccccggccctcgcccaggttcactgcaaccgttcagaggtccccaggagctgctgctggcgagcccgctactgcagggacctatggagccattccgtagtgccatcccgagcaacgcactgctgcagcttccctgagcctttccagcaagtttgttcaagattggctgtcaagaatcatggactgttattatatgccttgttttctgtcaagacaccatgattcctggtaaccgaatgctgatggtcgttttattatgccaagtcctgctaggaggcgcgagccatgctagtttgatacctgagacggggaagaaaaaagtcgccgagattcagggccacgcgggaggacgccgctcaggggcagagccatgagctcctgcgggacttcgaggcgacacttctgcagatgtttgggctgcgccgccgcccgcagcctagcaagagtgccgtcattccggactacatgcgggatctttaccggcttcagtctggggaggaggaggaagagcagatccacagcactggtcttgagtatcctgagcgcccggccagccgggccaacaccgtgaggagcttccaccacgaagaacatctggagaacatcccagggaccagtgaaaactctgcttttcgtttcctctttaacctcagcagcatccctgagaacgaggtgatctcctctgcagagcttcggctcttccgggagcaggtggaccagggccctgattgggaaaggggcttccaccgtataaacatttatgaggttatgaagcccccagcagaagtggtgcctgggcacctcatcacacgactactggacacgagactggtccaccacaatgtgacacggtgggaaacttttgatgtgagccctgcggtccttcgctggacccgggagaagcagccaaactatgggctagccattgaggtgactcacctccatcagactcggacccaccagggccagcatgtcaggattagccgatcgttacctcaagggagtgggaattgggcccagctccggcccctcctggtcacctttggccatgatggccggggccatgccttgacccgacgccggagggccaagcgtagccctaagcatcactcacagcgggccaggaagaagaataagaactgccggcgccactcgctctatgtggacttcagcgatgtgggctggaatgactggattgtggccccaccaggctaccaggccttctactgccatggggactgcccctttccactggctgaccacctcaactcaaccaaccatgccattgtgcagaccctggtcaattctgtcaattccagtatccccaaagcctgttgtgtgcccactgaactgagtgccatctccatgctgtacctggatgagtatgataaggtggtactgaaaaattatcaggagatggtagtagagggatgtgggtgccgctgagatcaggcagtccttgaggatagacagatatacacaccacacacacacaccacatacaccacacacacacgttcccatccactcacccacacactacacagactgcttccttatagctggacttttatttaaaaataataataaaaaaatggaaaaaatccctaaacattcaccttgaccttatttatgactttacgtgcaaatgttttgaccatattgatcatatattttgacaaaatatatttataactacgtattaaaagaaaaaaataaaatgagtcattattttaaaggtaaaa

SEQ ID NO: 29 - DNA, 1450 bp, Homo sapiens
  misc_feature: Incyte ID No: 1284593.1
  unsure 498: a, t, c, g, or other
gaatgctgctcaagttggctgatcaagagataggcagtgcaaaggaacaggatttgagacagcccagggtttcctcttcaagtaggtctaaaacattttttttttctcatggacttccttccggttctaactgccagtactcagaagttcagagttgagagacagaggcaccccgggacagaagatgcgtcgcactgaattctcccagaaatagattcagaattgactgaacaaagccccagagccacaatgttggaggaggatgacgatgattaagctgggacagggcaagcctcaattataatgcctccaccactagaagtgccctgatatagagtctgcaggataatggactaagatgatgacgacgtctaattaacgtaccaacgaaaacgctgctgggacgatggtcctgtggtgacagatcccgaaagcccccaattgtcgttgtcgacccggtctcacccttggtttgtgagtagtgcccccgggaccaantcctaccactgtgaccttactgggagatctggcaagccctcaacaaaggaaaccagttgctgttaaagggaaggtcctgaatatagagtccaaaattcacttcaaagttgaacagggatattgtgtcaggcctgcaagatacgttacagcacacctactagcgactaggggtgaaacgtggataaagcaacattttatggtttggcagctatggacctcggcctgagcgagtatgagttcctcactccagtatgaggatggctcccaagggcatgctgggcgcgaggcacgttaccacaacgaagtccttcttcaccgacgatgacaagcaagaccaccttcagctgggagtggaacctgtcgattaagaaggagtggacagaatgaatgcatccaccacctttcacaccacaccttgccacctgggaaggaattcttttcagggcgtgttcagcaaccctgtccctccttccctgtccacagcctgggtccctcttcaacactgccacatttccttattgatggcatctttatccacaccctgtcactcaaacgtggtaccctagaacaagaggcttaaaatgcgggctttcatccgcaacctgcatccctctgatcctcccatccagggcccagatctttccaaggtcttccatcttcagtacacaagtcattctagatatttccctgctcttaccccctattcaaggcaactaggagggccaggaaaatggggcaaaattattcactaaccaaggtctttgactcaaggttccgagtagttcattctaatgccctagattcgtttagtggttgttgctgggcccaatgaggtccctagtcaacatcccctgcccagaggggagttcttctttttgtgagagacactgtaaacgacacaagagaacaagaataaaacaataactgtgtggtgttctggctgaaaaaaaaa

SEQ ID NO: 30 - DNA, 1466 bp, Homo sapiens
  misc_feature: Incyte ID No: 4843169CB1
tttttttttttttttttttttttttttttttttttaaggtttgcccgcccacagatgtagttttctctgcgcgtgtgcgttttccctcctccccgccctcagggtccacggccaccatggcgtattaggggcagcagtgcctgcggcacatgcagcattggcctttgcagcggcggcagcagcaccaggctctgcagcggcaacccccagcggcttaagccatggcgcttctcacggcattcagcagcagcgttgctgtaaccgacaaagacaccttcgaattaagcacattcctcgattccagcaaagcaccgcaacatgaccgaaatgagcttcctgagcagcgaggtgttggtgggggacttgatgtcccccttcgaccagtcgggtttgggggctgaagaaagcctaggtctcttagatgattacctggaggtggccaagcacttcaaacctcatgggttctccagcgacaaggctaaggcgggctcctccgaatggctggctgtggatgggttggtcagtccctccaacaacagcaaggaggatgccttctccgggacagattggatgttggagaaaatggatttgaaggagttcgacttggatgccctgttgggtatagatgacctggaaaccatgccagatgaccttctgaccacgttggatgacacttgtgatctctttgcccccctagtccaggagactaataagcagcccccccagacggtgaacccaattggccatctcccagaaagtttaacaaaacccgaccaggttgcccccttcaccttcttacaacctcttcccctttccccaggggtcctgtcctccactccagatcattcctttagtttagagctgggcagtgaagtggatatcactgaaggagataggaagccagactacactgcttacgttgccatgatccctcagtgcataaaggaggaagacaccccttcagataatgatagtggcatctgtatgagcccagagtcctatctggggtctcctcagcacagcccctctaccaggggctctccaaataggagcctcccatctccaggtgttctctgtgggtctgcccgtcccaaaccttacgatcctcctggagagaagatggtagcagcaaaagtaaagggtgagaaactggataagaagctgaaaaaaatggagcaaaacaagacagcagccactaggtaccgccagaagaagagggcggagcaggaggctcttactggtgagtgcaaagagctggaaaagaagaacgaggctctaaaagagagggcggattccctggccaaggagatccagtacctgaaagatttgatagaagaggtccgcaaggcaagggggaagaaaagggtcccctagttgaggatagtcaggagcgtcaatgtgcttgtacatagagtgctgtagctgtgtgttccaataaattattttgtagggaaaaaaaaaaaaaa

SEQ ID NO: 31 - DNA, 994 bp, Homo sapiens
  misc_feature: Incyte ID No: 462434CB1
  unsure 116: a, t, c, g, or other
aaaaagggcatctcctgctggcttctcacttggcagctttatcactgcaagtgacagaatggggagggttctgtctctcctgcgtgcttggagagctggggggctataaaaagagncggcactgggcagctgggagacagggacagacgtaggccaagagaggggaaccagagaggaaccagaggggagagacagagcagcaagcagtggattgctccttgacgacgccagcatgagctccttctccaccaccaccgtgagcttcctccttttactggcattccagctcctaggtcagaccagagctaatcccatgtacaatgccgtgtccaacgcagacctgatggatttcaagaatttgctggaccatttggaagaaaagatgcctttagaagatgaggtcgtgcccccacaagtgctcagtgagccgaatgaagaagcgggggctgctctcagccccctccctgaggtgcctccctggaccggggaagtcagcccagcccagagagatggaggtgccctcgggcggggcccctgggactcctctgatcgatctgccctcctaaaaagcaagctgagggcgctgctcactgcccctcggagcctgcggagatccagctgcttcgggggcaggatggacaggattggagcccagagcggactgggctgtaacagcttccggtactgaagataacagccagggaggacaagcagggctgggcctagggacagactgcaagaggctcctgtcccctggggtctctgctgcatttgtgtcatcttgttgccatggagttgtgatcatcccatctaagctgcagcttcctgtcaacacttctcacatcttatgctaactgtagataaagtggtttgatggtgacttcctcgcctctcccaccccatgcattaaattttaaggtagaacctcacctgttactgaaagtggtttgaaagtgaataaacttcagcaccatggacagaagacaaaaaaaaa

SEQ ID NO: 32 - DNA, 2468 bp, Homo sapiens
  misc_feature: Incyte ID No: 1966838CB1
cccacccctctcccgggcggagggggcgggaagagcgcgtcctggccaagccgagtagtgtcttccactcggtgcgtctctctaggagccgcgcgggaaggatgctggtccgcaggggcgcgcgcgcagggcccaggatgccgcggggctggaccgcgctttgcttgctgagtttgctgccttctgggttcatgagtcttgacaacaacggtactgctaccccagagttacctacccagggaacattttcaaatgtttctacaaatgtatcctaccaagaaactacaacacctagtacccttggaagtaccagcctgcaccctgtgtctcaacatggcaatgaggccacaacaaacatcacagaaacgacagtcaaattcacatctacctctgtgataacctcagtttatggaaacacaaactcttctgtccagtcacagacctctgtaatcagcacagtgttcaccaccccagccaacgtttcaactccagagacaaccttgaagcctagcctgtcacctggaaatgtttcagacctttcaaccactagcactagccttgcaacatctcccactaaaccctatacatcatcttctcctatcctaagtgacatcaaggcagaaatcaaatgttcaggcatcagagaagtgaaattgactcagggcatctgcctggagcaaaataagacctccagctgtgcggagtttaagaaggacacgggagagggcctggcccgagtgctgtgtggggaggagcaggctgatgctgatgctggggcccaggtatgctccctgctccttgcccagtctgaggtgaggcctcagtgtctactgctggtcttggccaacagaacagaaatttccagcaaactccaacttatgaaaaagcaccaatctgacctgaaaaagctggggatcctagatttcactgagcaagatgttgcaagccaccagagctattcccaaaagaccctgattgcactggtcacctcgggagccctgctggctgtcttgggcatcactggctatttcctgatgaatcgccgcagctggagccccacaggagaaaggctgggcgaagacccttattacacggaaaacggtggaggccagggctatagctcaggacctgggacctcccctgaggctcagggaaaggccagtgtgaaccgaggggctcaggaaaacgggaccggccaggccacctccagaaacggccattcagcaagacaacacgtggtggctgataccgaattgtgactcggctaggtggggcaaggctgggcagtgtccgagagagcacccctctctgcatctgaccacgtgctacccccatgctggaggtgacatctcttacgcccaacccttccccactgcacacacctcagaggctgttcttggggccctacaccttgaggaggggcaggtaaactcctgtcctttacacattcggctccctggagccagactctggtcttctttgggtaaacgtgtgacgggggaaagccaaggtctggagaagctcccaggaacaactgatggccttgcagcactcacacaggacccccttcccctaccccctcctctctgccgcaatacaggaacccccaggggaaagatgagcttttctaggctacaattttctcccaggaagctttgatttttaccgtttcttccctgtattttctttctctactttgaggaaaccaaagtaaccttttgcacctgctctcttgtaatgatatagccagaaaaacgtgttgccttgaaccacttccctcatctctcctccaagacactgtggacttggtcaccagctcctcccttgttctctaagttccactgagctccatgtgccccctctaccatttgcagagtcctgcacagttttctggctggagcctagaacaggcctcccaagttttaggacaaacagctcagttctagtctctctggggccacacagaaactctttttgggctcctttttctccctctggatcaaagtaggcaggaccatgggaccaggtcttggagctgagcctctcacctgtactcttccgaaaaatcctcttcctctgaggctggatcctagccttatcctctgatctccatggcttcctcctccctcctgccgactcctgggttgagctgttgcctcagtcccccaacagatgcttttctgtctctgcctccctcaccctgagccccttccttgctctgcacccccatatggtcatagcccagatcagctcctaacccttatcaccagctgcctcttctgtgggtgacccaggtccttgtttgctgttgatttctttccagaggggttgagcagggatcctggtttcaatgacggttggaaatagaaatttccagagaagagagtattgggtagatattttttctgaatacaaagtgatgtgtttaaatactgcaattaaagtgatactgaaacaaaaaaaaaaaa

SEQ ID NO: 33 - DNA, 1182 bp, Homo sapiens
  misc_feature: Incyte ID No: 020906.18
cggtctctgagggaatatagtagaaatgcatatgcacgtcaattgcacgcagcatttcaccgattgtggactgtattggctaatgtgtttcctggtctttagatgcaaaccattgaataacactatcttatctcatagttttttccaggggtgcttcttgattagtagggaattttgaacacctctttaaatacagctagaaaataaaccaatttgtaaagccacatttgcatatgatgccagcctcacgcatttgtatatctccagaaattcaggtatgcctcaccaatttgcccgtctttaataaaatcttgtgttaaaatttgcatcacgtcgccttcctatgtatgacgaaacaagaaacagagatttccaattgctcttttgtcttcagacatttagtaatataaagtacctatttttatgctgaaatgtttatacaggtttattaatagcaagtgcaactaactggcggcatgccttgcaacacattttgatatattagccatgcttccgggtaaaggcaagccccaaactccttatcttttgcagtctctctgggatcagtaaaagaaaaaaaaaataatgtgcttaagaagtgggactgtaaatatgtatatttaactttgtatagcccatgtacctaccttgtatagaaaaataattttaaaaatttgaatggaagggggtaaaggaggtcatgaagtttttttgcatttttatttaaatgaaggaattccaaataactcacctacagatttttagcacaaaaatagccattgtaaagtgttaaaatttacgataagtattctattggggaggaaaggtaactctgatctcagttacagtttttttttcctttttaatttcattattttgggtttttggtttttgcagtcctatttatctgcagtcgtattaagtcctattgctagaataggttactacaaaaaaggttatattctgaaagaaaaataactgacattatatataaccaattaatttaaagtattgccatttaaattacacactgagagcatgtcctatgcagacatagatttttctgttcatttatttttcttcattgcagtggattgatttgataaatagatgtgttgaattactacatttgctgtacatattatttaataaactttattcagaattgcgtggcaaaaaaaa

SEQ ID NO: 34 - DNA, 1166 bp, Homo sapiens
  misc_feature: Incyte ID No: 887619.26
cccttttttttttttttggattgcaaaaatttattaaaattggagacactgttttaatcttcttgtgccatgagactccatcaggcagtctacaaagaccactgggaggctgaggatcacttgagccccagaagtttgaggctgtagtaagcttcaaaggccactgcactctagcttgggtgaggcaagaccctttcaagcagtaagctgcatgcttgcttgttgtggtcattaaaaaccctagtttaggataacaggtctgcctgcatttcttcaatcatgaattctgagtcctttgcttctttaaaacttgctccacacagtgtagtcaagccgactctccatacctttaaaaggtatgacaggaactgtcttcatgtccttacccaagcaagtcatccatggataaaaacgttaccaggagcagaaccattaagctggtccaggcaagttggactccaccatttcaacttccagctttctgtctaatgcctgtgtgccaatggcttgagttaggcttgctctttaggacttcagtagctattctcgtcgactcctgtgaggtatggtgctgggtgcagatgcagtgtggctctggatagcaccttatggacagttgtgtccccaaggaaggatgagaatagctactgaagtcctaaagagcaagcctaactcaagccattggcacacaggcattagacagaaagctggaagttgaaatggtggagtccaacttgcctggaccagcttaatggttctgctcctggtaacgtttttatccatggatgacttgcttgggtatggacatgaagaccgttcctgtcataccttttaaaggtatggagagtcggcttgactacactgtgtggagcaagttttaaagaagcaaaggactcagaattcatgattgaagaaatgcaggcagacctgttatcctaaactagggtttttaatgaccacaacaagcaagcatgcagcttactgcttgaaagggtcttgcctcacccaagctagagtgcagtggcctttgaagcttactacagcctcaaacttctgggctcaagtgatcctcagcctcccagtggtctttgtagactgcctgatggagtctcatggcacaagaagattaaaacagtgtctccaattttaataaatttttgcaatcc

SEQ ID NO: 35 - DNA, 3211 bp, Homo sapiens
  misc_feature: Incyte ID No: 1135936.1
  unsure 1650, 1661: a, t, c, g, or other
atgcaaaagtcaaagtaggtaacaggttggtaattaagtgtcaggaagactggaagaggcaaaaatcaagcagagttccaataagtgtatgaaaaaaaaatcataactgaaggtttaagaaagtccccaaggcagaatcacaatatgagcaggaggaataaaaagcttttggatataccaggcagctttctgtacgactcaggtttacaggtgaaattcctcagtttgagttcagaagaatttgaacttattccagctaaaatactgtcaatctttttattactgcctcctcccccatcttctgtctgggcaaagagatgcttggacttaggtccaaagctcctgccagggggagggaccatgtgtcacagcataacagacgcttgcaagtgctttactgagcagggctcaggtttgcagcaactctgataggctcacacaatggcctccattttacagcccctccttggaggcccactgatcagctgaaatgggaacacatgttgagccactaaccaccccggtgatggattagtttggattcaggaaagcgtgattattcttgaaataaacgaagctgaatagacatgctgacctcattcagttgatgagaggcagggaaagctggcttccaggactgccagcccacagagagctcagccctattggtccactttaattcatttcattgggctagtgtcaaccatacccactacggataaagatgttgccagatgaagcccagaagtgagcttcaccagactctgtagctcagagtcagaaacacgcatggaaaactaggtcatgggtattctaattttggtcttcagggaggctgctgacctaaagcgagttgctgagttagaccctatttgaaaaggaaaatgtgaaaaacaggaaggcactgaggtcttgttatctacataacaaatattcaggcacagaaaatatcataggttaaaatttcaagaagagtaaggcattagttggatcatgagaaggcagaagattatgttttctaacttgtaaggatcactggatcctactggattatgaagtgaatggcagtaatccactaactccttaaacagtgggaaaagagtgtgctgaaaatctgcccacatacttgtacactccatggccataccctggaattcttcccttaacataaaatgaccaacattttggagtaggcagttgaggttgttggttcttttcttttttttttttttcctcctcagttcttcatatttctctcaaattacctttcagcaatatgttcatatctcagccaataaagcgagtggttgatccacatgtgcaaataaaagggtaggaaagaaatataaatgggttttaaaaattcagactgccaaaaatagatgaaatagctcagaagagacataatatttatgaattgaattatcttggttgaaaataaaaagatcactttctcagttttcataagtattatgtctcttctgagctatttcatctatttttggcagtctgaatttttaaaacccatttaaatttttttccttacctttttatttgcatgtggatcaaccatcgctttattggctgagatatgaacatattgttgaaaggtaatttgagagaaatatgaagaactgaggagggaaaaanaaaaaaaaganaagaaccaacaacctcaactgcctactccaaaatgttggtcattttatgttaagggaagaattccagggtatggccatggagtgtacaagtatgtgggcagattttcagcaaactcttttcccactgtttaaggagttagtggattactgccattcacttcataatccagtaggatccagtgatccttacaagttagaaaacataatcttctgccttctcatgatccaactaatgccttactcttcttgaaattttaacctatgatattttctgtgcctgaatatttgttatgtagataacaagacctcagtgccttcctgtttttcacattttccttttcaaatagggtctaactcagcaactcgctttaggtcagcagcctccctgaagaccaaaattagaatatccatgacctagttttccatgcgtgtttctgactctgagctacagagtctggtgaagctcacttctgggcttcatctggcaacatctttatccgtagtgggtatggttgacactagcccaatgaaatgaattaaagtggaccaatagggctgagctctctgtgggctggcagtcctggaagccagctttccctgcctctcatcaactgaatgaggtcagcatgtctattcagcttcgtttattttcaagaataatcacgctttcctgaatccaaactaatccatcaccggggtggtttagtggctcaacattgtgttcccatttcagctgatcagtgggcctccaaggaggggctgtaaaatggaggccattgtgtgagcctatcagagttgctgcaaacctgacccctgctcagtaaagcacttgcaaccgtctgttatgctgtgacacatggcccctccccctgccaggagctttggacctaatccaagcatccctttgcccagaaagaagatgggggaggaggcagtaataaaaagattgaagtattttgctggaataagttcaaattcttctgaactcaaactgaggaatttcacctgtaaacctgagtcgtacagaaagctgcctggtatatccaaaagctttttattcctcctgctcatattgtgattctgcctttggggacttttcttaaaccttcagttatgatttttttttcatacacttattggaactctgcttgatttttgcctcttccagtcttcctgacactttaattaccaacctgttacctactttgactttttgcatttaaaacagacactggcatggatatagttttacttttaaactgtgtacataactgaaaatgtgctatactgcatactttttaaatgtaaagatatttttatctttatatgaagaaaatcacttaggaaatggctttgtgattcaatctgtaaactgtgtattccaagacatgtctgttctacatagatgcttagtccctcatgcaaatcaattactggtccaaaagattgctgaaattttatatgcttactgatatattttacaattttttatcatgcatgtcctgtaaaggttacaagcctgcacaataaaaatgtttaacggttaaaaa

SEQ ID NO: 36 - DNA, 540 bp, Homo sapiens
  misc_feature: Incyte ID No: 2233360CB1
catatttggcctcaatgatcatttctcaacaattcctcaccgcaggagcctctgaagctcccaccaggccagctctcctcccacaacagcttcccacagcatgaagatctccgtggctgccattcccttcttcctcctcatcaccatcgccctagggaccaagactgaatcctcctcacggggaccttaccacccctcagagtgctgcttcacctacactacctacaagatcccgcgtcagcggattatggattactatgagaccaacagccagtgctccaagcccggaattgtcttcatcaccaaaaggggccattccgtctgtaccaaccccagtgacaagtgggtccaggactatatcaaggacatgaaggagaactgagtgacccagaaggggtggcgaaggcacagctcagagacataaagagaagatgccaaggccccctcctccacccaccgctaactctcagccccagtcaccctcttggagcttccctgctttgaattaaagaccactcatgctcttaaaaaaaaaaaaaa

SEQ ID NO: 37 - DNA, 2364 bp, Homo sapiens
  misc_feature: Incyte ID No: 052560.1
gaggcccggcgaggatgctggagggagcggggcgcggatcggcccagatggagcagctccgctccgcggggatcaggcccagggcttcggcttcacctgcagacctcgcctgagcgggcgcctctgaagtggagggcgggccgcctgggccgcgggcctcgggaggatggtggcgccctggcgcgtctccgtcagggtttgcctgtcgcacctgaggtgcttcgagctcagacagggactcagcctcctgaggccctccgagtgccctcgcgatgccaggctctgctggcttctgctgggcactttgcccaaggtcgtctccctgtgcggggacgtgggtgagggggcccctgacgttctgagtcggcgaagggtccgctgcagcggggcggctggcgcggggcccgcggagagcctcccccgagcgggacctctgggcggcgtcttcctgcatctccgcctctggcttcgcgccggcgctctgttggtgaaattcttccccctcctactcctctaccccctcacctacctggctcccagcgtctccaccctctggctccacctgcttctgaaagccaccgagacctcaggcccaacctacatcaaactgggccagtgggccagcacccggcgcgatctgttttcggaggctttctgtgcccaattttccaagctgcatgtccgagtgacgccccacccgtggactcacactgagcgcttccttcggcaggcttttggggatgactgggggagcatcctctcttttgagaaccgggaacctgtgggctcaggctgcgtggcccaggtgtacaaagcatacgccaacactgccttcctggagactgacagcgtccagagacttggcagggcctcctgtctgccgcccttctcacatactggggcagtcggtgggctgagagagctctttggataccttggaaatggccggaaacctccagaaaatctcgcagaccagtcgtttctagaaaggctgctcctccctaaagctgacctggttggatcaaatgcaggggtgtctcgggctcaggtccctggccaccaacctgaggccaccaacctcatctccgtggcagtgaaagtgttgcaccctggcctgctcgctcaggtgcatatggacctgctgctgatgaagattggcagccgagtcctgggagttttgccaggcatcaagtggcttagcttgcctgagattgtggaggaatttgagaagctgatggtccaacagattgacctgcgttacgaagctcagaatctagaacacttccaggtcaacttccggaatgtgaaagccgtcaagttccccacccctctgcgcccctttgtcaccagagaagtcttggtggaaacgtatgaagagagtgtgcctgtgtccagttaccagcaggcaggaattcccgtggacttgaaaaggaagattgcacggctggggatcaacatgctcctgaagatgatatttgtggataactttgtccatgcagaccttcaccctggaaacatcctggttcagggtgccaacggcctgtcctcgagtcaggaggcgcagctgcagcaggcggacatctgtgacactctggtggtggccgtgccatcttccctctgcccgctgcgactggtgctgctggatgctggcattgtggcggagctgcaggcccctgacctgaggaatttccgggcagttttcatggctgtggtgatggggcagggccagagagtggctgagctgatcctgcatcatgcccgggccagcgagtgcagggacgtggaggggttcaaaaccgagatggccatgctggtgacccaggccaggaagaacaccatcaccctggagaagcttcatgtgtccagccttctctctagtgtctttaagttgctgatgactcacaaggtaaagcttgagagcaactttgcctccattgtgtttgccatcatggtgttggaggggcttggccgctcactggaccccaaactggacatcctggaggcagcgaggcccttcctcctcacgggcccagtgtgccccccgtgatggggcagtggcctctgtgggcccttgtcaagagctggaggccactcccaagagcctctcctatggcagctgggacgttttaaaattgggacaccaatttcaaatgtaaccctccagtggtggaaggcacaccatggcttcctctgcttggtttgagggtctgttcaaaagctttgggccaattagggagtaaaaggagggaaggggcctatccattccattgtggaagctgggccaggtgccagggacactctccttcagggaaaatgttatgtggaggaggacgaataaatttattttgttttcctgtttttctc

SEQ ID NO: 38 - DNA, 3154 bp, Homo sapiens
  misc_feature: Incyte ID No: 1519105CB1
caagagcaaaaagcgtgggcagttggagaagaagcagccagagtgtgaagaagcccacggaagggaagtccagggaggaggaaaagaagcagaagttttggcatctgttccctggctgtgccaagatgggcgattggagcttcctgggaaatttcctggaggaagtacacaagcactcgaccgtggtaggcaaggtctggctcactgtcctcttcatattccgtatgctcgtgctgggcacagctgctgagtcttcctggggggatgagcaggctgatttccggtgtgatacgattcagcctggctgccagaatgtctgctacgaccaggctttccccatctcccacattcgctactgggtgctgcagatcatcttcgtctccacgccctctctggtgtacatgggccacgccatgcacactgtgcgcatgcaggagaagcgcaagctacgggaggccgagagggcaaaggaggtccggggctctggctcttacgagtacccggtggcagagaaggcagaactgtcctgctgggaggaagggaatggaaggattgccctccagggcactctgctcaacacctatgtgtgcagcatcctgatccgcaccaccatggaggtgggcttcattgtgggccagtacttcatctacggaatcttcctgaccaccctgcatgtctgccgcaggagtccctgtccccacccggtcaactgttacgtatcccggcccacagagaagaatgtcttcattgtctttatgctggctgtggctgcactgtccctcctccttagcctggctgaactctaccacctgggctggaagaagatcagacagcgatttgtcaaaccgcggcagcacatggctaagtgccagctttctggcccctctgtgggcatagtccagagctgcacaccaccccccgactttaatcagtgcctggagaatggccctgggggaaaattcttcaatcccttcagcaataatatggcctcccaacaaaacacagacaacctggtcaccgagcaagtacgaggtcaggagcagactcctggggaaggtttcatccaggttcgttatggccagaagcctgaggtgcccaatggagtctcaccaggtcaccgccttccccatggctatcatagtgacaagcgacgtcttagtaaggccagcagcaaggcaaggtcagatgacctatcagtgtgaccctcctttatgggaggatcaggaccaggtgggaacaaaggaggctcagagaggaaagacgtgtcccttctgaactgatgctttctcactgtcatcactgcttggctcctttgagccccgggtctcaatgacgttgctcattaattctagaaactataaccagggctctgggatagtaagagaggtgacaacccacccagactgcagttccctccccaccctctacccagtatacgaagcctttcagattactcatgaaacagggtagagggaaagaagggaagcatggcaaaagctggcctggaagggatagccagagggatagaatgactctctctctacataccagcagcataccaaatgcgttctctaagttcctacctccttgacctgatcaccctccctcctccaaggaagagctcaaagttcccagccaatagacagcatgaatcaaggaacttgcattatatgtgctcttgaatctgttgtctccatggaccattcctcggagtagtggtgagatggccttgggttgcccttggcttctcctccctctactcagccttaaaaagggcttcttggaactttaccagcagcctcagctttacaaatgccttggtatgtacctctggcaaatgccccaccttggtgatgttgcaacctttccttctgctagggtgtacacctagcctgtgcaggtgtcagccctgctagggagtcactgtacacacaaactctactggaattcctgccaacatctgtcaccctgcagctcctttacagttcaatccaatgatagaaaccatcccttccctttctcccttggctgttcacccagccattccctgaaggccttaccaacaggaatatccaagaagctgttgtcctctctcgaaccctgaccagatcatcagccactgaggccagtggaatttccccaggccttgttaaaacaaagaaagcattgtacttctcagattccccttgtggaaaaaaaaattctgctgtgaagatgaaaataaaaatggagagaaaacactggaaaactattttcccctcctatttacttcctttgctgactgccaacttagtgccaagaggaggtgtgatgacagctatggaggcccccagatctctctctcctggaggctttagcaggggcaaggaaatagtaggggaatctccagctctcttggcagggcctttatttaaagagcgcagagattcctatgtctccctagtgcccctaatgagactgccaagtgggggctgtagaaaagccttgccttccccagggattggcctggtctctgtattcactggatccataatgggttgctgttgttttggatgaaggtaaacgatgcttggaattggaaactgagacttatagagagattattacattattaaaatgcacgtgtgtgtgtgtgtgggtgctgatgggatgggtaaaggcttggggagtcctgaaataaggaaaggaaaccacagagaaacttgtgtcttcctgctctcctctccggctgcctggcagttattaacctaaacagatagccacaagaggttgggacagaggagggtaaaggctcagaaggaggttcaacctctgactcacctgcccatctctgggccctctgctgacacttggatgctattgttgggtggaaagataaatgagagtggagaggtggaggaaagtgactaggatgccatttaggaaggaatgtctgatcatcccgggtccctggaggggacaccttttaatctattgcctagcattaatattttctctccttctatctctgaaatgttttatgaaatgagtgttcttgaattagaaattctgtgggatcaatctttgatggtgagggttttagaaaggaaaaatatagtaaaatgtgtaatttgtcttaataaaatctatctctacatctaaaaaaaaaaaaaaa

SEQ ID NO: 39 - DNA, 5700 bp, Homo sapiens
  misc_feature: Incyte ID No: 235938.4
gtaggacctgaacttccttggaggtcaggcgaccagacccggggtcctgggccttggaaacagacatcccctctgtccatctgggcaggagcatgggacgccctgctggcggacttggagtctaccacctcccacatctccaaacggcctgtgttcttgtcggaggagaccccctactcatacccaactggaaaccacacataccaggagattgccgtgccaccccccgtccccccacccccgtccagcgaggccctcaatggcacaatccttgaccccttagaccagtggcagcccagcggctcccgattcatccaccagcagcctcagtcctcatcacctgtgtacggctccagtgccaaaacttccagtgtctccaaccctcaggacagtgttggctctccgtgctcccgagtgggtgaggaggagcacgtctacagcttccccaacaagcagaaatcagctgagccttcacccaccgtaatgagcacgtccctgggcagcaacctttctgaactcgaccgcctgctgctggaactgaacgctgtacagcataacccgccaggcttccctgcagatgaggccaactcaagccccccgcttcctggggccctgagccccctctatggtgtcccagagactaacagccccttgggaggcaaagctgggcccctgacgaaagagaagcctaagcggaatgggggccggggcctggaggacgtgcggcccagtgtggagagtctcttggatgaactggagagctccgtgcccagccccgtccctgccatcactgtgaaccagggcgagatgagcagcccgcagcgcgtcacctccacccaacagcagacacgcatctcggcctcctctgccaccagggagctggacgagctgatggcttcgctgtcggatttcaagggctcctggcccctggaggaggttgtacttcttgtctccatcagctcatctgtccaggagggagaaaagtacccccatccctgtgctgccagacaccgtaccccgagcctcaggagtcctgaccagccccctccgtgtccacagttcatggcccaggggaagacagggagcagctcaccccctggggggcccccgaagcccgggagccagctggacagcatgctggggagcctgcagtctgacctgaacaagctgggggtcgccacagtcgccaaaggagtctgcggggcctgcaagaagcccatcgccgggcaggttgtgaccgccatggggaagacgtggcaccccgagcacttcgtctgcacccactgccaggaggagatcggatcccggaacttcttcgagcgggatggacagccctactgtgaaaaggactaccacaacctcttctccccgcgctgctactactgcaacggccccatcctggataaagtggtgacagcccttgaccggacgtggcaccctgaacacttcttctgtgcacagtgtggagccttctttggtcccgaagggttccacgagaaggacggcaaggcctactgtcgcaaggactacttcgacatgttcgcacccaagtgtggcggctgcgcccgggccatcctggagaactatatctcagccctcaacacgctgtggcatcctgagtgctttgtgtgccgggaatgcttcacgccattcgtgaacggcagcttcttcgagcacgacgggcagccctactgtgaggtgcactaccacgagcggcgcggctcgctgtgttctggctgccagaagcccatcaccggccgctgcatcaccgccatggccaagaagttccaccccgagcacttcgtctgtgccttctgcctcaagcagctcaacaagggcaccttcaaggagcagaacgacaagccttactgtcagaactgcttcctcaagctcttctgctaggtgccctgcccctgtctctgccccccttcccctactcatacccaactggaaaccacacataccaggagattgccgtgccaccccccgtccccccacccccgtccagcgaggccctcaatggcacaatccttgaccccttagaccagtggcagcccagcggctcccgattcatccaccagcagcctcagtcctcatcacctgtgtacggctccagtgccaaaacttccagtgtctccaaccctcaggacagtgttggctctccgtgctcccgagtgggtgaggaggagcacgtctacagcttccccaacaagcagaaatcagctgagccttcacccaccgtaatgagcacgtccctgggcagcaacctttctgaactcgaccgcctgctgctggaactgaacgctgtacagcataacccgccaggcttccctgcagatgaggccaactcaagccccccgcttcctggggccctgagccccctctatggtgtcccagagactaacagccccttgggaggcaaagctgggcccctgacgaaagagaagcctaagcggaatgggggccggggcctggaggacgtgcggcccagtgtggagagtctcttggatgaactggagagctccgtgcccagccccgtccctgccatcactgtgaaccagggcgagatgagcagcccgcagcgcgtcacctccacccaacagcagacacgcatctcggcctcctctgccaccagggagctggacgagctgatggcttcgctgtcggatttcaagttcatggcccaggggaagacagggagcagctcaccccctggggggcccccgaagcccgggagccagctggacagcatgctggggagcctgcagtctgacctgaacaagctgggggtcgccacagtcgccaaaggagtctgcggggcctgcaagaagcccatcgccgggcaggttgtgaccgccatggggaagacgtggcaccccgagcacttcgtctgcacccactgccaggaggagatcggatcccggaacttcttcgagcgggatggacagccctactgtgaaaaggactaccacaacctcttctccccgcgctgctactactgcaacggccccatcctggataaagtggtgacagcccttgaccggacgtggcaccctgaacacttcttctgtgcacagtgtggagccttctttggtcccgaagggttccacgagaaggacggcaaggcctactgtcgcaaggactacttcgacatgttcgcacccaagtgtggcggctgcgcccgggccatcctggagaactatatctcagccctcaacacgctgtggcatcctgagtgctttgtgtgccgggaatgcttcacgccattcgtgaacggcagcttcttcgagcacgacgggcagccctactgtgaggtgcactaccacgagcggcgcggctcgctgtgttctggctgccagaagcccatcaccggccgctgcatcaccgccatggccaagaagttccaccccgagcacttcgtctgtgccttctgcctcaagcagctcaacaagggcaccttcaaggagcagaacgacaagccttactgtcagaactgcttcctcaagctcttctgctaggtgccctgcccctgtctctgccccccttccccagccagcatccccaactgcgactgtgacctagagacttcacccgggggtgaaggggtaaacccgactgaaactggaacccttgtcctccgctggtgcgggatggacagagggccgtgaggggtccccctgcttgtcttcacccctgccagagcctctgggccccctcctccctcctgtagctctccctaggctgcccactctccatcctccccaggggtagaggctgggggctccaccccagcccatgtacgtccccacgaactggcctggccagcaccccacactggagccatctcttcctcatatttcagcagtgcagccggggggcagggaagggcaggcagggtctgttggggtctctttttatccttattcctcccccgacctaattgtctttgttctgtgattattgggggacacccggctccctccagacaatgccagcataaatccatccatccaaaggcagagaaccaaaggggccatggaaggttctctgtgctcctcctacccttccagtgccctaggcctggcgactgcccctgccttttagacccgccctccccttttatacctgctcttgttctactgagaaaagcctctccagcaataatgttttctagtcacttcctccgtctccgggacggcgtgcctggacactgtaccgactttgatagatttctacactgaggtttgaattcatatcgcctgagttgcttttacttctctatacaaaatgattttgaagagattttaaagacgttcccttttgtattctcttcctcatccaccgccactgggcctgtcactgatggtggctctggtgtgaagtttgctttgtactgagggttggggtggggaagcaatttgtattttattgtttcttagcacaagcaggtgaactgggagcagctctgtgactccccctctttcacttcatagctcaccaggactgttttataaactgctgtatttggaaaccccttctttacttcccaggccagcaagctcttcactgaaactggttgaagggtgttgcacccttttgggcctagaattctgaactttatctgttctgtttctgtgggaggagaaggggaagtatgttttggggggctgcttcctgtctgagtaagccctcaggagcctctgctcccctgtgaacccactgaaccttctgagcccccactgcttctatggggctctctcttctgccttctcaggaaagctggtgtctgattttggccatcaggactctgacgtctctttggtcttgttgatttcctctgggcatatcccttccccagatctgctcctcccctttcacaggtgggatcggcactcagggggtctggaaagaaggtcataagggagcatgataggatttggggcagagggacaggctcctctggggaaaccccccagagctctttaccaaggatgaaagaggagccaggccttgggctcctgatgaggagaaaggggccccaccggggtctaatggtgacagtccaaaccactccactggcctcctggcagaagccgagtgtgctggggtctccgaagagggtccctcctttttgggggaaggtcagcccagcccctccaaaggtctgatgtctccactttcacccgcaggccttaccgctctgtttatagtgacccaccctagatcttccccaagagggactggggtttctggggtccattctctgagtcagtggttatttgaaaatttgattttgattttattttttctctgtaaacttccaagctggcttttcccatttcaattcctgtgatttatgccaataaagtttgcccatgattttcacctgtgctagtgctatttcttggtggtctgaacctcatggtcccagcagagaccaaacccaccccagatgcagctggatcaccagatggagggtaaattgtggatgtttcctttcttgaggtcaaaatccctggggctggggtccgtggtccttgcctgtggtcacaggtcctccccgtgggctttgctcctgcctgggcagttggtgaggacaggctggggagcagcgggatggggccctgtggggcagggcctgcccagggtgtgatcacctgggtttaccaagggcatcctcactcacgggcttgtgggtgg

SEQ ID NO: 40 - DNA, 973 bp, Homo sapiens
  misc_feature: Incyte ID No: 1909433CB1
ctcgagccgcgcggccccggggcgcacgcgcacgcaatcgcgtttccggagagacctggctgctgtgtcccgcggcttgcgctccgtagtggactccgcgggccttcggcagatgcaggcctggggtagtctcctttctggactgagaagagaagaatggagaagcccctcttcccattagtgcctttgcattggtttggctttggctacacagcactggttgtttctggtgggatcgttggctatgtaaaaacaggcagcgtgccgtccctggctgcagggctgctcttcggcagtctagccggcctgggtgcttaccagctgtatcaggatccaaggaacgtttggggtttcctagccgctacatctgttacttttgttggtgttatgggaatgagatcctactactatggaaaattcatgcctgtaggtttaattgcaggtgccagtttgctgatggccgccaaagttggagttcgtatgttgatgacatctgattagcagaagtcatgttccagcttggactcatgaaggattaaaaatctgcatcttccactattttcaatgtattaagagaaataagtgcagcatttttgcatctgacattttacctaaaaaaaaaaagacaccaaatttggcggaggggtggaaaatcagttgttaccattataaccctacagaggtggtgagcatgtaacatgagcttattgagaccatcatagagatcgattcttgtatattgattttatctctttctgtatctataggtaaatctcaagggtaaaatgttaggtgttgacattgagaaccctgaaaccccattccctgctcagaggaacagtgtgaaaaaaaatctcttgagagatttagaatatcttttcttttgctcatcttagaccacagactgactttgaaattatgttaagtgaaatatcaatgaaaataaagtttactataaataataaaaaaaaaa

SEQ ID NO: 41 - DNA, 752 bp, Homo sapiens
  misc_feature: Incyte ID No: 1095728.19
acgagatcctccaggctgtgcatagaatctgatttacatatggattcccaacacccagttcactagaaattcacattatccatattacacaatccaaactttgaaatggatcaaaccagaattccttcttcagtcccagttgcctgattctaactttcttcatccggtattattttctgtctgttaacaggacttggtggcacaaaatacatctcctttgaggaacggcagtggcataacgactgctttaactgtaagaagtgctccctctcactggtggggcgtggcttcctcacagagagggacgacatcctgtgccccgactgtgggaaagacatctgaattcaacacagagaagttgctgcttgtgatctcacacacagatttttatgttttctttctcacccaggcaatcttgccttctggtttcttccagccacattgagactttcttctagtgcttttcagtgatactcacgtttgcttaaaccctttagtgctttgtgatagttcagtcccagggaaagagaaaactcgccctaggccctaggtgggaagatggtttgaaatttttgtaatcgagtaaggcacacccaaatgtaaaaatccttttgaatgatgcctttataaatctttctctcactgtctatttaagtgcaattaacatatgtcacgaacttgaaagttttctaaactcaataaggtaatgaccagttgttatttacagctctgtaacctcccgttgcgtcaag

SEQ ID NO: 42 - DNA, 2291 bp, Homo sapiens
  misc_feature: Incyte ID No: 008542.10
  unsure 2048-2112, 2176, 2269, 2282: a, t, c, g, or other
tgcatttgagactgaagactctttaacttcaaagtaaaaactgtagtaataattgagaatttttgcagcaatattactttatacttgtaaaactggtcatcttaaaattttgtaaaatagtaaaatttagcaaaattgatactagaaaatttatgaaaatatcttggctttctcttagtagtttttgtaggctcttaagagtgtatcattaagctttagcgtaacagattcttttcaatcaagtactggaatcagttgtccaggtggagtaatacagaaaagctaaggtctagaaaccaggggaccattttagatacaaagcagaattgcggaattgccagattataacttgaggtttgttcgggggattttttttaaccatctaaaataaatgtatataagatggactgagtcttctaaagagattctaaaactatattcttacttaagtctgaacaggaattaagaataactcaaagtgaatttgatcgtcaagcagagattaccagacttctgctagagggaatcagcagtacacatgcccatcaccttcgctgtctgaatgactttgtagaagcccagatgacttactatgcacagtgttaccagtatatgttggacctccagaaacaactgggaagttttccatccaattatcttagtaacaacaatcagacttctgtgacacctgtaccatcagttttaccaaatgcgattggttcttctgccatggcttcaacaagtggcctagtaatcacctctccttccaacctcagtgaccttaaggagtgtagtggcagcagaaaggccagggttctctatgattatgatgcagcaaacagtactgaattatcacttctggcagatgaggtgatcactgtgttcagtgttgttggaatggattcagactggctaatgggggaaaggggaaaccagaagggcaaggtgccaattacctacttagaactgctcaattaagtaggtggactatggaaaggttgcccatcatgacattgtatttatatacaattaactctaaataaagcaggttaagtatcttccatgttaatgtgttaagagactgaaaataccagccatcagaaactggcctttctgccaataaagttgcatggtaaatatttcattacagaatttatgttagagctttcatgccaagaatgttttcttacaaaattctctttttattgaggtttcactaataagcagcttctacttttgagcctcaacttaaagcagaactgttttctactggatttttcattaacagcaagctttttcttttatgtaaaataaatctattgtgaattgatatcagcgactcatttattaggtataaataatagccaaagaataaaattaaaatttattttaaactttcggtcttaaaaagagctgtaggatataaacctcttttgtgaaaagtagaattttctgaatgctttcatagacaaaaacgcatttaaactatgtttacctggttttccaacagaaatcaaatgattttaatattatgttttgatgggttattttcagagttgtttggttttttaaacactactgaatggtttcttttaaatttaagaacaactagttcttgaaaagcaataccgtatttctctgataaatttgtagttaaggttctagaaaatctaggacaaatttacttcattaaacataaagtttttaagattattcaattggcacaatttaatgcataattgggattggatccatttactgtactgtggtacagtaaagagaatgtgttcttattgaacagcagatttgtatacaaatacggaataatgcaactacattataaattgtatacgaacaaaataaattgggtcactctgagcttactattaaaacattgaaaatttattaatgaacacaggctatcttgatgaggatctctgcttatgaaacacatactaatgaaattattagtgacacattggaagctagaaaattgctgttggggccattgctataaatcattgtttccatgttaagacttctgttcnnnnnnnnnnnnnnnnnnnnnnnnnnnnnnnnnnnnnnnnnnnnnnnnnnnnnnnnnnnnnnnnntcctgaacaatatgcacacagttacttgcccctgcagagcttaaagaccattaaaggatacagnaaattaagcaattatcctatagtaggattcgtggtgtgatggggaaaatacaaggtactgtatttgggagtcatgtaactccagttttgggantgagagcgggtcnggggaagaa

SEQ ID NO: 43 - DNA, 1538 bp, Homo sapiens
  misc_feature: Incyte ID No: 1990126CB1
gcgccccagcccggccgcggcacctccgcctcgccgccgctaggtcggccggctccgcccggctgccgcctaggatgaatatcatggacttcaacgtgaagaagctggcggccgacgcaggcaccttcctcagtcgcgccgtgcagttcacagaagaaaagcttggccaggctgagaagacagaattggatgctcacttagagaacctccttagcaaagctgaatgtaccaaaatatggacagaaaaaataatgaaacaaactgaagtgttattgcagccaaatccaaatgccaggatagaagaatttgtttatgagaaactggatagaaaagctccaagtcgtataaacaacccagaacttttgggacaatatatgattgatgcagggactgagtttggcccaggaacagcttatggtaatgcccttattaaatgtggagaaacccaaaaaagaattggaacagcagacagagaactgattcaaacgtcagccttaaattttcttactcctttaagaaactttatagaaggagattacaaaacaattgctaaagaaaggaaactattgcaaaataagagactggatttggatgctgcaaaaacgagactaaaaaaggcaaaagctgcagaaactagaaattcatctgaacaggaattaagaataactcaaagtgaatttgatcgtcaagcagagattaccagacttctgctagagggaatcagcagtacacatgcccatcaccttcgctgtctgaatgactttgtagaagcccagatgacttactatgcacagtgttaccagtatatgttggacctccagaaacaactgggaagttttccatccaattatcttagtaacaacaatcagacttctgtgacacctgtaccatcagttttaccaaatgcgattggttcttctgccatggcttcaacaagtggcctagtaatcacctctccttccaacctcagtgaccttaaggagtgtagtggcagcagaaaggccagggttctctatgattatgatgcagcaaacagtactgaattatcacttctggcagatgaggtgatcactgtgttcagtgttgttggaatggattcagactggctaatgggggaaaggggaaaccagaagggcaaggtgccaattacctacttagaactgctcaattaagtaggtggactatggaaaggttgcccatcatgactttgtatttatatacaattaactctaaataaagcaggttaagtatcttccatgttaatgtgttaagagactgaaaataccagccatcagaaactggcctttctgccaataaagttgcatggtaaatatttcattacagaatttatgttagagctttcatgccaagaatgttttcttacaaaattctctttttattgaggtttcactaataagcagcttctacttttgagcctcaacttaaagcagaactgttttctactggatttttcattaacagcaagctttttcttttatgtaaaataaatctattgtgaattgaaaaaaaaaaaaaaa

SEQ ID NO: 44 - DNA, 1529 bp, Homo sapiens
  misc_feature: Incyte ID No: 198725.2
gggcggggcagagggagggcaggagggaggccggccccctagtaggaaatgagacacagtagaaataacactttataagcctcttcctcctcccatctcctggcctccttccatcctcctctgcccagactccgcccctcccagacggtcctcacttctcttttccctagactgcagccagcggagcccgcagccggcccgagccaggaacccaggtccggagcctcaacttcaggatgttgacaacattgctgccgatactgctgctgtctggctgggccttttgtagccaagacgcctcagatggcctccaaagacttcatatgctccagatctcctacttccgcgacccctatcacgtgtggtaccagggcaacgcgtcgctggggggacacctaacgcacgtgctggaaggcccagacaccaacaccacgatcattcagctgcagcccttgcaggagcccgagagctgggcgcgcacgcagagtggcctgcagtcctacctgctccagttccacggcctcgtgcgcctggtgcaccaggagcggaccttggcctttcctctgaccatccgctgcttcctgggctgtgagctgcctcccgagggctctagagcccatgtcttcttcgaagtggctgtgaatgggagctcctttgtgagtttccggccggagagagccttgtggcaggcagacacccaggtcacctccggagtggtcaccttcaccctgcagcagctcaatgcctacaaccgcactcggtatgaactgcgggaattcctggaggacacctgtgtgcagtatgtgcagaaacatatttccgcggaaaacacgaaagggagccaaacaagccgctcctacacttcgctggtcctgggcgtcctggtgggcagtttcatcattgctggtgtggctgtaggcatcttcctgtgcacaggtggacggcgatgttaattactctccagccccctcagaaggggctggattgatggaggctggcaagggaaagtttcagctcactgtgaagccagactccccaactgaaacaccagaaggtttggagtgacagctcctttcttctcccacatctgcccactgaagatttgagggaggggagatggagaggagaggtggacaaagtacttggtttgctaagaacctaagaacgtgtatgctttgctgaattagtctgataagtgaatgtttatctatctttgtggaaaacagataatggagttggggcaggaagcctatggcccatcctccaaagacagacagaatcacctgaggcgttcaaaagatataaccaaataaacaagtcatccacaatcaaaatacaacattcaatacttccaggtgtgtcagacttgggatgggacgctgatataatagggtagaaagaagtaacacgaagaagtggtggaaatgtaaaatccaagtcatatggcagtgatcaattattaatcaattaataatattaataaatttcttatatttaaggcaaaaaaaaacaaaaaagggcggccgccg

SEQ ID NO: 45 - DNA, 3053 bp, Homo sapiens
  misc_feature: Incyte ID No: 1359783CB1
ctagtattctactagaactggaagattgctctccgagttttgttttgttattttgtttaaaaaataaaaagcttgaggccaaggcaattcatattggctcacaggtatttttgctgtgctgtgcaaggaactctgctagctcaagattcacaatgttgaaagcccttttcctaactatgctgactctggcgctggtcaagtcacaggacaccgaagaaaccatcacgtacacgcaatgcactgacggatatgagtgggatcctgtgagacagcaatgcaaagatattgatgaatgtgacattgtcccagacgcttgtaaaggtggaatgaagtgtgtcaaccactatggaggatacctctgccttccgaaaacagcccagattattgtcaataatgaacagcctcagcaggaaacacaaccagcagaaggaacctcaggggcaaccaccggggttgtagctgccagcagcatggcaaccagtggagtgttgcccgggggtggttttgtggccagtgctgctgcagtcgcaggccctgaaatgcagactggccgaaataactttgtcatccggcggaacccagctgaccctcagcgcattccctccaacccttcccaccgtatccagtgtgcagcaggctacgagcaaagtgaacacaacgtgtgccaagacatagacgagtgcactgcagggacgcacaactgtagagcagaccaagtgtgcatcaatttacggggatcctttgcatgtcagtgccctcctggatatcagaagcgaggggagcagtgcgtagacatagatgaatgtaccatccctccatattgccaccaaagatgcgtgaatacaccaggctcattttattgccagtgcagtcctgggtttcaattggcagcaaacaactatacctgcgtagatataaatgaatgtgatgccagcaatcaatgtgctcagcagtgctacaacattcttggttcattcatctgtcagtgcaatcaaggatatgagctaagcagtgacaggctcaactgtgaagacattgatgaatgcagaacctcaagctacctgtgtcaatatcaatgtgtcaatgaacctgggaaattctcatgtatgtgcccccagggataccaagtggtgagaagtagaacatgtcaagatataaatgagtgtgagaccacaaatgaatgccgggaggatgaaatgtgttggaattatcatggcggcttccgttgttatccacgaaatccttgtcaagatccctacattctaacaccagagaaccgatgtgtttgcccagtctcaaatgccatgtgccgagaactgccccagtcaatagtctacaaatacatgagcatccgatctgataggtctgtgccatcagacatcttccagatacaggccacaactatttatgccaacaccatcaatacttttcggattaaatctggaaatgaaaatggagagttctacctacgacaaacaagtcctgtaagtgcaatgcttgtgctcgtgaagtcattatcaggaccaagagaacatatcgtggacctggagatgctgacagtcagcagtatagggaccttccgcacaagctctgtgttaagattgacaataatagtggggccattttcattttagtcttttctaagagtcaaccacaggcatttaagtcagccaaagaatattgttaccttaaagcactattttatttatagatatatctagtgcatctacatctctatactgatcagatcttgtgagacttattcactaccacaacaatagtatgggggaaactgcccccatgattcaaattatctccctcccacaacacgcgggaattatgggagtacaattcaagaggcgatttgggtggggacacagccaaaccatatcagtgtatatgtagcacattttctttgtggatgtggatccttgagggtggaggaaggagcaagggactgattattttgagttggtggtagagcctggtcgtcaggaaagaccacataggggtgcagcataaactatgacttcagagatggaaaggaattccccagatatgcaggtgaggaaggggacttgtggcaaggtccctgcatgtgtgaaggcatgggacaggagagactatcacttgtattgctcttgggtcttccctccccttccccccgcccttgcctctgtcccagggatccactggggctaaagggatgtcctggggcccagactgctagaggagccatgctacagggtctgttcagcacccccacctgactcctgacgcagagaggtggagaagctcatgggtcagcactgggcttggctgcccatctgaggcctgcaactgtggccagcatggaatgtctatgggaggccatcagctgggacatttagaactcttctgggaggggcgctcttgacccttctggagagcatgtggggaagcagaggagctgctcccctaagccaggaggagctggtgctgagttgtttattgggtgagagttgtgtccaacaccaatgatctttaaatgaactgagtcctagagctgtccggaagactagaactaggaccccggttggagactgcagggagtgcttatagttgacatcggacagggcagctccgttaggaaggagtgtcacctgcactgggaaggttccaaggaagaggttgcctgccttagagaccaagtaccctgataggccagcatcaggctggcctagtacaaagatggtctcgaagcgcccccagggaaatgtgcctccaacaaatcgaagtggataaaaagggcaggacactctaatgagcaccgggcactctctagacatctttttcagattccccctcgctatgaggcaggtctgtctccatcttgcagatgagaatctcagtgaggaggttcaggatcacacagccagtacaggactctggtgccgcgccgtctctaaagcccaccgttcaaccactcgcctgtgctctcagagaggtcggtggaacctgcgggatttctggaaggggagcctgagagagcttcagaagggcgaagactgtca

SEQ ID NO: 46 - DNA, 1692 bp, Homo sapiens
  misc_feature: Incyte ID No: 198266.64
  unsure 1682: a, t, c, g, or other
agccatgtaacaaaaccccaggagtgcagagatagtggttcccgctggcgcaaagaacagggaccctggaggacgaaggactccgacgtacgctctccgcttgcaacctccgggaccatcttctcggccatctcctgcttctgggacctgccagcaccgtttttgtggttagctccttcttgccaaccaaccatgagctcccagattcgtcagaattattccaccgacgtggaggcagccgtcaacagcctggtcaatttgtacctgcaggcctcctacacctacctctctctgggcttctatttcgaccgcgatgatgtggctctggaaggcgtgagccacttcttccgcgaactggccgaggagaagcgcgagggctacgagcgtctcctgaagatgcaaaaccagcgtggcggccgcgctctcttccaggacatcaagaagccagctgaagatgagtggggtaaaaccccagacgccatgaaagctgccatggccctggagaaaaagctgaaccaggcccttttggatcttcatgccctgggttctgcccgcacggacccccatctctgtgacttcctggagactcacttcctagatgaggaagtgaagcttatcaagaagatgggtgaccacctgaccaacctccacaggctgggtggcccggaggctgggctgggcgagtatctcttcgaaaggctcactctcaagcacgactaagagccttctgagcccagcgacttctgaagggccccttgcaaagtaatagggcttctgcctaagcctctccctccagccaataggcagctttcttgggggtctctctatgcagcccaggctgatctccagggaatatttaatcattgttgaaatatccaccaccccgggccacaccacactccaacattcccgcccaccgcccccttgaactctggtgagtgggtgccggctctgtctcccagtcacagtcacaaggtcacaggtagagcagcagcctgcccaaggtcctgagatcacaggtgctggcaccagatcacagcccagctccgcccccttccccaggcctcccaggagtgagtactccaggggtctggtccctgtgaggctcacgtgacacaatctgtccccagcagggaccacagacttagctctggggaagctctgtcaagagggaagactggagtgaagaccagggatgccactacccccaggcctcctttcccagcctcggctgctgccaggcactggcattttattcctcctcctgccatctcctctctgccctttcccctgcttgccccctgcccaacgtgtgcggtgctgtgacagcagagtggagtcccaggctccgggtgggaacagccactggccagagccggtggggaaaggcaggcttaaggccttggcagaagaggcaggaggggaccggctttcttcccccgtgtttctggggtgcttaaagggctctgtccacatgtgctgggggccactgaagagcaggttccaatgtgtttccaccccaccccatcctagcctcagacctcaggtctgcacagcccagctgcagggtgccctggaaggcatcagggacatttccaactccagcccccgccctccacgccccccgacctgttcaggcgatctccccccacacagaaaactgcctggcccagtctgggcgncctggcgccc

SEQ ID NO: 47 - DNA, 10284 bp, Homo sapiens
  misc_feature: Incyte ID No: 1098479.1
atggggagaagacggaggctgtgtctccagctctacttcctgtggctgggctgtgtggtgctctgggcgcagggcacggccggccagcctcagcctcctccgcccaagccgccccggccccagccgccgccgcaacaggttcggtccgctacagcaggctctgaaggcgggtttctagcgcccgagtatcgcgaggagggtgccgcagtggccagccgcgtccgccggcgaggacagcaggacgtgctccgagggcccaacgtgtgcggctccagattccactcctactgctgccctggatggaagacgctccctggaggaaaccagtgcattgtcccgatttgtagaaatagttgtggagatggattttgttcccgtcctaacatgtgtacttgttccagtgggcaaatatcatcaacctgtggatcaaaatcaattcagcagtgcagtgtgagatgcatgaatggtgggacctgtgcagatgaccactgccagtgccagaaaggatatattggaacttattgtggacaacctgtctgtgaaaatggatgtcagaatggtggacgttgcatcggacccaaccgctgtgcttgtgtttatgggttcactggtccacagtgtgaaagagattacaggacaggcccgtgtttcactcaggtcaacaaccagatgtgccaagggcagctgacaggcattgtctgcacgaagactctgtgctgtgccaccattggacgggcgtggggccatccctgtgagatgtgtccagcccagcctcagccctgccgacggggtttcatccccaacatccgcactggagcttgccaagatgttgatgaatgccaggctatcccagggatatgccaaggaggaaactgtatcaatacagtgggctcttttgaatgcagatgccctgctggtcacaaacagagtgaaactactcagaaatgtgaagacattgatgagtgcagcatcattcctgggatatgtgaaactggtgaatgttccaacaccgtgggaagctatttttgtgtttgtccacgtggatatgtaacctcaacagatggctctcgatgcatcgatcagagaacaggcatgtgtttctcgggcctggtgaatggccgctgtgcacaagagctcccggggagaatgacgaaaatgcagtgctgctgtgagcctggcccgctgctggggcatcggaaccattcctgaagcctgtcctgtcagaggttctgaggaatatcgcagactttgcatggatggacttccaatgggaggaattccagggagtgctggttccagacctggaggcactgggggaaatggctttgccccaagtggcaatggcaatggctatggcccaggagggacaggcttcatccccatccctggaggcaatggcttttctcctggcgttgggggagccggtgtgggggccgggggacagggacctatcatcactggactaacaattctgaaccagacaatagatatctgtaagcatcatgctaacctttgtttaaatggacgctgtataccaactgtctcaagctaccgatgtgaatgcaacatgggttataagcaggatgcaaatggagattgtatagatgttgatgaatgcacatcaaatccctgcactaatggagattgtgttaacacacctggttcctattattgtaaatgtcatgctggattccagaggactcctaccaagcaagcatgcattgatattgatgagtgcatccagaatggggttctttgtaaaaacggtcgatgcgtgaacacagatggaagtttccagtgcatttgcaatgccggctttgaattaactacagatggaaaaaactgtgttgatcatgatgaatgtacaactaccaacatgtgtttgaatggaatgtgcatcaatgaagatggcagcttcaagtgcatctgcaaaccaggatttgtcttggctccaaatgggcgttactgtactgatgttgatgaatgccagaccccaggaatctgcatgaatgggcactgcatcaacagtgaagggtccttccgctgtgactgtcccccaggcctggctgtgggcatggatggacgtgtgtgtgttgatactcacatgcgcagtacctgctatggaggaatcaagaaaggagtgtgtgtgcgtcctttccccggtgcagtgaccaagtccgaatgctgctgtgccaatccagactatggttttggagaaccctgccagccatgccctgcaaaaaattcagctgaattccacggcctttgtagtagtggagtaggtatcactgtggatggaagagatatcaatgaatgtgctttggatcctgatatatgtgccaatgggatttgtgaaaacttacgtggtagttaccgttgtaattgcaacagtggctatgaaccagatgcctctggaagaaactgtattgacattgatgaatgtttagtaaacagactgctttgtgataacggattgtgccgaaacacgccaggaagttacagctgtacgtgcccaccagggtatgtgttcaggactgagacagagacctgtgaaggatataaatgaatgtgaaagcaacccatgtgtcaatggggcctgcagaaacaaccttggatctttcaattgtgaatgttcgcccggcagcaaactcagctccacaggattgatctgtattgacagcctgaaggggacctgttggctcaaacatccaggacagcgctgtgaggtgaatattaatggagccactctgaaatctgaatgctgtgccaccctcggagccgcctgggggagcccctgtgagcggtgtgaactagatacagcttgcccaagagggcttgccaggattaaaggtgttacgtgtgaagatgttaatgagtgtgaggtgttccctggcgtttgtccaaatggacgctgtgtcaacagtaagggatcttttcattgcgagtgccctgaaggccttacgttggatgggactggccgtgtatgtttggatattcgcatggagcagtgttacttgaagtgggatgaagatgaatgcatccaccccgttcctggaaagttccgcatggatgcctgctgctgtgctgtcggggcggcttggggcaccgagtgtgaggagtgccccaaacctggcaccaaggaatacgagacgctgtgcccccgcggggctggctttgctaaccgaggggatgttcttactgggcggccatttacaaagacatcaatgaatgcaaagcatttcctgggatgtgcacttatgggaagtgcagaaatacaatcggaagcttcaaatgccgttgcaatagtggctttgctctagacatggaggaaagaaactgcacggacatcgacgagtgcaggatttctcctgacctctgtggcagtggaatctgcgtcaatacaccgggcagctttgagtgcgagtgcttcgaaggctatgaaagtggcttcatgatgatgaagaactgcatggacattgacgaatgtgaacgtaaccctctcctttgtaggggtggcacctgtgtgaacactgagggcagctttcagtgtgactgcccactgggacacgagctgtcaccatcccgtgaggactgtgtggatattaatgaatgctccctgagtgacaatctctgcagaaatggaaaatgtgtgaacatgattggaacctatcagtgctcttgcaatcctggatatcaggctacgccagaccgccagggctgtacagatattgatgaatgtatgataatgaacggaggctgtgacacccagtgcacaaattcagagggaagctacgaatgcagctgcagtgagggttatgccctgatgccagatgggagatcgtgtgcagacattgatgaatgtgaaaacaatcctgatatctgtgatggcggccagtgtaccaacattcctggagagtatcgctgcctctgctatgatggcttcatggcttccatggacatgaaaacatgcattgatgtcaatgaatgtgacctaaattcaaatatctgcatgtttggggaatgtgagaacacaaagggatccttcatttgccactgtcagctgggttactcagtgaagaaggggaccacaggatgtacagatgtggatgagtgtgaaattggtgctcataactgcgacatgcatgcctcatgtctgaatatcccaggaagcttcaagtgtagctgcagagaaggctggattggaaacggcatcaagtgtattgatctggacgaatgttctaatggaacccaccagtgtagcatcaatgctcagtgtgtaaataccccgggctcataccgctgtgcctgctccgaaggtttcactggtgatggctttacctgctcagatgttgatgagtgtgcagaaaacataaacctctgtgagaacggacagtgccttaatgtcccgggtgcatatcgctgcgagtgtgagatgggcttcactccagcctcagacagcagatcctgccaagatattgatgaatgctccttccaaaacatttgtgtctctggaacatgtaataacctgcctggaatgtttcattgcatctgcgatgatggttatgaattggacagaacaggagggaactgtacagatattgatgagtgtgcagatcctataaactgtgtcaatggcctatgtgtcaacacgcctggtcgctatgagtgtaactgcccacccgattttcagttgaacccaactggtgtgggttgtgttgacaaccgtgtgggcaactgctacctgaagtttggacctcgaggagatgggagtctgtcttgcaacaccgagatcggggtgggcgtcagtcgctcttcatgctgctgctctctgggaaaggcctggggaaacccctgtgagacatgcccccctgtcaatagcactgaatattacaccctgtgtcccggaggtgaaggcttcagacctaaccccatcacaatcattttagaagacattgacgaatgccaggagttaccaggtctctgccagggtggaaactgcatcaacacttttgggagcttccagtgtgagtgcccacaaggctactacctcagcgaggatacccgcatctgtgaagatattgatgagtgttttgcacatcctggtgtgtgtgggcctgggacctgctataacaccctgggaaattacacctgcatttgcccacctgagtacatgcaggtcaatggaggccacaactgcatggacatgagaaaaagcttttgctaccgaagctataatggaaccacttgtgagaatgagttgcctttcaatgtgacaaaaaggatgtgctgctgcacatataatgtgggcaaagcctggaacaaaccttgtgaaccatgcccaactccaggaacagctgactttaaaaccatatgtggaaatattcctggattcacctttgacattcacacaggaaaagctgttgacattgatgaatgtaaagagattccaggcatttgtgcaaatggtgtgtgcattaaccagattggcagtttccgctgtgaatgccctacaggattcagttacaatgacctgctgttggtttgtgaagatatagatgagtgcagcaatggtgataatctctgccagcggaatgcagactgcatcaatagtcctggtagttaccgctgtgaatgtgccgcgggtttcaaactttcacccaatggggcctgtgtagatcgcaatgaatgtttagaaattcctaacgtttgcagtcatggcttgtgtgttgatctgcaaggaagttaccagtgcatctgccacaatggctttaaggcttctcaggaccagaccatgtgcatggatgttgatgagtgcgagcggcacccatgtggaaatggaacttgtaaaaacaccgttggatcctataactgtctgtgctacccagggtttgaactcactcataataatgattgcctggacatagatgagtgcagttccttttttggtcaggtgtgcagaaatggacgttgttttaatgaaattggttctttcaagtgtctatgtaacgaaggttatgaacttaccccagatggcaaaaactgtatagacactaatgagtgtgtcgcccttcccggctcttgctctcctggtacctgtcagaatttggagggatccttcagatgcatctgtcccccagggtatgaagtaaaaagcgagaactgcattgatataaatgaatgtgatgaagatcccaacatttgtctttttggttcctgtactaatactccagggggcttccagtgcctctgcccccctggctttgtactatctgataatggacggagatgctttgatactcgccagagcttctgcttcacaaattttgaaaatggaaagtgttctgtacccaaagctttcaacaccacaaaagcaaaatgctgctgtagtaagatgccaggagagggctggggggacccctgtgagctgtgccccaaagacgatgaagttgcatttcaggatttgtgtccatatggccatggaactgtccctagtcttcatgatacacgtgaagatgtcaatgagtgtcttgagagcccaggcatttgttcaaatggtcaatgtatcaacaccgacggatcttttcgctgtgaatgtccaatgggctacaaccttgactacactggagtacgctgtgtggatactgatgagtgttcaatcggcaatccgtgtggaaatggtacatgcaccaatgttattgggagttttgaatgcaattgcaatgaaggctttgagccagggcccatgatgaattgtgaagatatcaacgaatgtgcccagaacccactgctgtgtgctttccgctgcatgaacacttttgggtcctatgaatgcacgtgcccgattggctatgccctcagggaagatcaaaagatgtgcaaagatctggatgaatgtgctgaagggttacacgactgtgaatctaggggcatggtgtgtaagaatctaatcggcaccttcatgtgcatctgccctcctggaatggcccgaaggcccgatggagaaggctgtgtagatgaaaatgaatgcaggaccaagccaggaatctgtgaaaatggacgttgtgttaacattattggaagctatagatgtgagtgtaatgaaggattccagtcaagttcttcaggcactgaatgccttgacaatcgacagggtctctgctttgcagaggtactgcagacaatatgtcaaatggcatccagcagtcgcaatctcgtcactaagtcagaatgctgctgtgatggtgggcgaggctggggccaccagtgcgagctttgcccacttcctggaactgcccagtacaaaaagatatgtcctcatggcccaggatatacaactgatggaagagatattgatgaatgtaaggtaatgccaaacctctgcaccaatggtcagtgcatcaataccatgggctcattccgatgcttctgcaaggttggctacaccacagacatcagtggaacctcttgtatagaccttgatgaatgctcccagtccccgaaaccatgcaactacatctgcaagaacactgaggggagttatcagtgttcatgtccgagggggtatgtcctgcaagaggatggaaagacatgcaaagaccttgatgaatgtcaaacaaagcagcataactgccagttcctctgtgtcaacaccctgggggggtttacctgtaaatgtccacctggtttcacacagcatcacactgcttgtatcgacaacaacgaatgtgggtctcaaccttcgctttgtggagcaaagggaatctgtcaaaacactccaggcagtttcagctgtgaatgccaaagagggttctctcttgatgccaccggactgaactgtgaagatgttgatgaatgtgatgggaaccacaggtgccaacacggctgccagaacatcctgggtggctacagatgtggctgcccccaaggctacatccagcactaccagtggaatcagtgtgtcgatgagaatgaatgctccaatcccaatgcctgtggctctgcttcctgctacaacaccctggggagttacaagtgcgcctgcccctcggggttctccttcgaccagttctccagtgcctgccacgacgtgaatgagtgctcgtcctccaagaacccctgcaattacggctgctctaacacggaggggggctacctctgtggctgcccccctgggtattacagagtgggacaaggccactgtgtctcaggaatgggatttaacaaggggcagtacctgtcactggatacagaggtcgatgaggaaaatgctctgtccccagaagcatgctacgagtgcaaaatcaacggctattctaagaaagacagcaggcagaagagaagtattcatgaacctgatcccactgctgttgaacagatcagcctagagagtgtcgacatggacagccccgtcaacatgaagttcaacctctcccacctcggctctaaggagcacatcctggaactaaggcccgccatccagcccctcaacaaccacatccgttatgtcatctctcaagggaacgatgacagcgtcttccgcatccaccaaaggaatgggctcagctacttgcacacggccaagaagaagctcatgcccggcacatacacactggaaatcactagcatccctctctacaagaagaaggagcttaagaaactggaagagagcaatgaggatgactacctcctaggggagcttggggaggctctcagaatgaggctgcagattcagctctattaacccttcacagacttgggcccaggctcaaatcctagcacagccagtctgcagaagcatttgaaaagtcaaggactaattttaaagaggaaaaataataataactcttgtttctttcctccctgtcttagactttgaatgttgaccctcacagggagggataatttagactctggtatggccaaagatttgagcacaaaggcaaccgtggttactgtattttttatataacttcattttaaaatatattaaaagaaacctaaatgttcaagatatcagcatatggcactaaatgcacaaaaataatgtgagcttttttttttttcctgttagcagtctgtaacactttgggtattttgctatagttgctaattaaaaaaatatagatgtttatttatttttaatgcagtaatatatggagaaatgaacaaactatgtaaacaaaaagggaaactcacttgtttttctttagatttataaatttgagctattttttttagaggtgctttttaaaaatccaatagatacaagagatgtttcctttggttttctgccagtcatccagctgatacacacctgatgattttaaagaaagccacacagagctgaatgggcagtgtaatcaataatttaaaagacatgaatgtcattagatcctttataacgtagatcgaagccaaagcagctcatttgtgacaacatttcatatcaccagacacaccaggcaacagaagttgaagcacaaccactgtagcaaaataccttgactgcttgtgagaccattagcattgcaggccaaaccgtactgtatttccttctcataacctcaaggaaccatatgtgctacccacaacacctcattcttacccagggtgcgctgcgtcctcatggtactgtaggcagctgaagaaccgccgttcccttgaaagggaacacctggcattctgtggtgtttcgtgctgtcttaaataatggtgcatttattatgttcaagttatttcaggattgccatatgtgcaaacaaatcatgcaatgcagccaaggaatatatgttgttgttgttgttttaaacccattttttttttagaattttcattaatactgtagttatacaccatatgcctcattttatcatagcctattgtgtatgaaagatgtttgtacaatgaattgatgtttagtttgctttagtcatttaaaaagatattgtaccaggatgtgctattaagagcacgtatccattattcttctcaacccaagaacctgtttcctggaccagtgaccaaacctcatatgtgaaatggccaaagcacatgcaggctcctggttgttcctctcaaacctgtgctgaccaaagattagtaaccagttatacccagtattttgaggttttattgtttttttaataactaaaaagaaaaaaggaacagtgtaaatttgtaatcaagagtttgtgaggaaaaacttatggtttttggttttgtttgtttttgtaggtctgtgtatcaaatatgacacttttcttgcaataaagcttattttggggt

SEQ ID NO: 48 - DNA, 3454 bp, Homo sapiens
  misc_feature: Incyte ID No: 493848CB1
  unsure 2, 9, 16, 39, 42, 68, 143, 268: a, t, c, g, or other
tngcgctcnggagctngcgaggcggcggcggctcctcangtnagtttgaaaaggaggatcgagctcantgtggagtatccatggagatgtggagccttgtcaccaacctctaactgcagaactgggatgtggagctggaagtncctcctcttctgggctgtgctggtcgcagccacactctgcaccgctaggccgtccccgaccttgcctgaacaagatgctctcccctcctcggaggatgatgatgatgatgatgactcctcttcanaggagaaagaaacagataacaccaaaccaaaccccgtagctccatattggacatccccagaaaagatggaaaagaaattgcatgcagtgccggctgccaagacagtgaagttcaaatgcccttccagtgggaccccaaaccccacactgcgctggttgaaaaatggcaaagaattcaaacctgaccacagaattggaggctacaaggtccgttatgccacctggagcatcataatggactctgtggtgccctctgacaagggcaactacacctgcattgtggagaatgagtacggcagcatcaaccacacataccagctggatgtcgtggagcggtcccctcaccggcccatcctgcaagcagggttgcccgccaacaaaacagtggccctgggtagcaacgtggagttcatgtgtaaggtgtacagtgacccgcagccgcacatccagtggctaaagcacatcgaggtgaatgggagcaagattggcccagacaacctgccttatgtccagatcttgaagactgctggagttaataccaccgacaaagagatggaggtgcttcacttaagaaatgtctcctttgaggacgcaggggagtatacgtgcttggcgggtaactctatcggactctcccatcactctgcatggttgaccgttctggaagccctggaagagaggccggcagtgatgacctcgcccctgtacctggagatcatcatctattgcacaggggccttcctcatctcctgcatggtggggtcggtcatcgtctacaagatgaagagtggtaccaagaagagtgacttccacagccagatggctgtgcacaagctggccaagagcatccctctgcgcagacaggtaacagtgtctgctgactccagtgcatccatgaactctggggttcttctggttcggccatcacggctctcctccagtgggactcccatgctagcaggggtctctgagtatgagcttcccgaagaccctcgctgggagctgcctcgggacagactggtcttaggcaaacccctgggagagggctgctttgggcaggtggtgttggcagaggctatcgggctggacaaggacaaacccaaccgtgtgaccaaagtggctgtgaagatgttgaagtcggacgcaacagagaaagacttgtcagacctgatctcagaaatggagatgatgaagatgatcgggaagcataagaatatcatcaacctgctgggggcctgcacgcaggatggtcccttgtatgtcatcgtggagtatgcctccaagggcaacctgcgggagtacctgcaggcccggaggcccccagggctggaatactgctacaaccccagccacaacccagaggagcagctctcctccaaggacctggtgtcctgcgcctaccaggtggcccgaggcatggagtatctggcctccaagaagtgcatacaccgagacctggcagccaggaatgtcctggtgacagaggacaatgtgatgaagatagcagactttggcctcgcacgggacattcaccacatcgactactataaaaagacaaccaacggccgactgcctgtgaagtggatggcacccgaggcattatttgaccggatctacacccaccagagtgatgtgtggtctttcggggtgctcctgtgggagatcttcactctgggcggctccccataccccggtgtgcctgtggaggaacttttcaagctgctgaaggagggtcaccgcatggacaagcccagtaactgcaccaacgagctgtacatgatgatgcgggactgctggcatgcagtgccctcacagagacccaccttcaagcagctggtggaagacctggaccgcatcgtgggcttgacctccaaccaggagtacctggacctgtccatgcccctggaccagtactcccccagctttcccgacacccggagctctacgtgctcctcaggggaggattccgtcttctctcatgagccgctgcccgaggagccctgcctgccccgacacccagcccagcttgccaatggcggactcaaacgccgctgactgccacccacacgccctccccagactccaccgtcagctgtaaccctcacccacagcccctgctgggcccaccacctgtccgtccctgtcccctttcctgctggcaggagccggctgcctaccaggggccttcctgtgtggcctgccttcaccccactcagctcacctctccctccacctcctctccacctgctggtgagaggtgcaaagaggcagatctttgctgccagccacttcatcccctcccagatgttggaccaacacccctccctgccaccaggcactgcctggagggcagggagtgggagccaatgaacaggcatgcaagtgagagcttcctgagctttctcctgtcggtttggtctgttttgccttcacccataagcccctcgcactctggtggcaggtgccttgtcctcagggctacagcagtagggaggtcagtgcttcgtgcctcgattgaaggtgacctctgccccagataggtggtgccagtggcttattaattccgatactagtttgctttgctgaccaaatgcctggtaccagaggatggtgaggcgaaggccaggttgggggcagtgttgtggccctggggcccagccccaaactgggggctctgtatatagctatgaagaaaacacaaagtgtataaatctgagtatatatttacatgtctttttaaaagggtcgttaccagagatttacccatcgggtaagatgctcctggtggctgggaggcatcagttgctatatattaaaaacaaaaaagaaaaaaaaggaaaatgtttttaaaaaggtcatatattttttgctacttttgctgttttatttttttaaattatgttctaaacctattttcagtttaggtccctcaataaaaattgctgctgcttcatttatctatgggctgtatgaaaagggtgggaatgtccactggaaagaagggacacccacgggccctggggctaggtctgtcccgagggcaccgcatgctcccggcgcaggttccttgtaacctcttcttcctaggtcctgcacccagacctcacgacgcacctcctgcctctccgctgcttttggaaagtcagaaaaagaagatgtctgcttcgagggcaggaaccccatccat

SEQ ID NO: 49 - DNA, 1859 bp, Homo sapiens
  misc_feature: Incyte ID No: 233889.11
gggcagcgccgagcccaggcagccccgcccgccgcgccccgcccagcccatgggccacgggcccccacggccgcccgccgggaggaccgagcctaagagggcagccgcctgaaggaacgcgacggcggcgcccgcagtatttttcagtgctgtacaagcgtcttgaattactctggtagcttttccagaaagacccatgacttcaccacatttctcgagttacgatgaaggtcctctggatgtcagcatggcagccacaaacctggagaaccagctgcacagcgcacagaagaacctcctgttccttcagcgggagcatgccagcacgctcaaggggctgcactccgagatcaggcggctgcagcagcactgcacagatttaacatatgagctgacagtcaaaagttcggaacagacaggagacgggacttctaaaagcagtgaattaaagaaaagatgtgaagagctggaagcccaactgaaagtgaaagagaacgaaaatgctgagttgttgaaagaactggagcagaaaaacgcgatgatcacagtgctggagaacaccatcaaggagcgagagaagaagtacctggaggagctgaaggccaagagtcacaagctgaccctgctgtctagcgagctggagcagcgggccagcaccatcgcctacctgacctcccagctgcacgccgccaagaagaagctcatgagctccagcgggacctcagatgccagcccgtcagggagccccgtgctggccagctacaagccagcgccccccaaagacaagctacccgaaacgcctcgccgccgcatgaaaaagagcctctcagcccccttgcacccggaatttgaagaggtctacagattcggggcagagagcaggaaactccttttgcgggaaccagtggatgctatgcccgaccccaccccatttctgctggctagggagtccgccgaggtccacctcatcaaagagaggcccctcgtcatcccccccatcgcctccgaccgaagcggcgagcagcacagcccggcccgcgaaaagccgcacaaggcccacgtcggggtggcacatcggatccaccacgccaccccgccgcaggcccagcccgaggtgaagaccctggcggtcgaccaggtgaacggaggcaaggtggtgaggaagcactcagggacggacagaactgtgtgaagcccgccgtgccccaccccgcgctgtccatgcactgtgagcaccactgggaaatctcagccacaccttttctgtttaatcccatgcatgccaaacacttttcacacctaccgacccattctccttctgcttctcttgccctcttcttcacaccaaaatatgatcgtgtccctgccgcagaatatgtatttcctaattgctgtggccaaacgcctgtgtgccgaatcgcttgcttctgatcccgctccgtgtaacctaagtgcgctgcaggcaaagcccaggccacggctgcgtcactactgatgttcacgatgccacacagtcacacacctaattcattctcaagtcggagcaacacataccaaccttgaccttatcctcaagctccagggcagcctggccgagcagcccctgctccctcctggagacccttgtcacctcccgagctcctcctggagacccctgtcacctcctgaccaacctttcccagggcggcaccgatcaccgagcagccgtgcgtgtatctcaaggaactaaataagatgacgctactcctcatagcaccacaacctgaatgtgtgttcatatttttttgttagttttatccaaaatgtttaagatcccaacaaactttattttctaaacctgcaaaaaaaaaaaaaagagg

SEQ ID NO: 50 - DNA, 1540 bp, Homo sapiens
  misc_feature: Incyte ID No: 412628.4
  unsure 1102: a, t, c, g, or other
gaggtaagaagcacagtgcattctacccactttgcgactgagaggctgtccctgacttttgctttggagttcatatttcttgcctccctttctgaaatccctgaggggtaaagcggggcgggaggggaggtgcggggagtgcatcctggggatggtggtaactgcacaatctgctgaggccctgagttcaggacttttcccctgctaaactttgaccacctccttgctccaccctccagctctagaccccaagtcaaatgttgaaagaatgaaattgggtggtggccccagcaggggtgacagagactcctgtcttgctgtctcacttttcacatggccttttccccaatcagacagctattaaaagaaacaaccccaggaagtttctgcgcagcgttggagatggggagactgtggaatttgatgtcgtggaaggagagaagggcgcagaagccactaattgtaactgggcctgggggagtacccgtgaagggcagccgttatgcccccaacctgacgtaagtcccgccgattcatcccccggactccctcagttgccccaccacccatggtggcagagatcccctcggcggggacaggacctggcagtaaaggggagcgggctgaagactctgggcaacggccccgacgatggtgccccccacccttcttctaccgacggcggtttgtgcgaggccccccgcctccccaaccagcagcagccttatagagggcactgacagggtagaaccccaagagacagccccattggaggggcaccaacagcagggagatgagcgagtccccccgcccagattccggcccaggtaccgaaggcctttccgccccaggccacgccagcagcctaccacagaaggtggggatggtgagaccaagcccagccaaggtcccgctgatggttcccggcctgagccccagcgcccacgaaaaccgcccctacttccagcggagacgggcagcaggcccctggcccccagcaggcccctggcccccggcagcccgcagcccctgagacctcagcccctgtcaacagtggggaccccccaccaccaccatcctgggagtgattccaactcaactnaactcaaaggacaccccagagctggccatctggtatctgccagtttttccaaaatgacctgtaccgtacccagtaccctgctccccctttcccataattcatgacatcaaaacaaccagcttttcaccttttccttgagactcaggaggaccaaaaagcagcagccttttgctttttcttttttcttccctccccttatcaaggggttgaaggaagggagccatccttactgttcagagacagcaactccctcccgtaactcaggctgagaaaggaaccagccagctctcaacctcctcctggttgtttttctttgcccccaccccaagtttatttttgttttcccccggccccctacctctgaagcccattttatcatctgtcatgtgccacctgaacctccagtgaaaacaaaaacaggcttccctgtggtcttgg

SEQ ID NO: 51 - DNA, 1086 bp, Homo sapiens
  misc_feature: Incyte ID No: 480187.92
ttccttcagatcctgacaccttagagctaagctttcaagtctccctgaggaccagccatacagctcagcatctgagtggtgtgcatcccattctcttctggggtcctggtttcctaagatcatagtgaccacttcgctggcactggagcagcatgagggagacagaaccagggctatcaaaggaggctgactttgtactatctgatatgcatgtgtttgtggcctgtgagtctgtgatgtaaggctcaatgtccttacaaagcagcattctctcatccatttttcttcccctgttttctttcagactgtggcttcacctccggtaagtgagtctctcctttttctctctatctttcgccgtctctgctctcgaaccagggcatggagaatccacggacacaggggtgtgagggaggccagagccacctgtgcacaggtacctacatgctctgttcttgtcaacagagtcttaccagcaaggggtcctgtctgccaccatcctctatgagatcttgctagggaaggccaccttgtatgccgtgctggtcagtgccctcgtgctgatggccatggtaaggaggagggtgggatagggcagatgatgggggcaggggatggaacatcacacatgggcataaaggaatctcagagccagagcacagcctaatatatcctatcacctcaatgaaaccataatgaagccagactggggagaaaatgcagggaatatcacagaatgcatcatgggaggatggagacaaccagcgagccctactcaaattaggcctcagagcccgcctcccctgccctactcctgctgtgccatagcccctgaaaccctgaaaatgttctctcttccacaggtcaagagaaaggattccagaggctagctccaaaaccatcccaggtcattcttcatcctcacccaggattctcctgtacctgctcccaatctgtgttcctaaaagtgattctcactctgcttctcatctcctacttacatgaatacttctctcttttttctgtttccctgaagattgagctcccaacccccaagtacgaaataggctaaaccaataaaaaatg

SEQ ID NO: 52 - DNA, 2218 bp, Homo sapiens
  misc_feature: Incyte ID No: 1372419CB1
tgcgcccccgagcagcgcccgccccctccgcgccttctccgccgggacctcgagcgaaagacgcccgcccgccgcccagccctcgcctccctgcccaccgggcacaccgcgccgccaccccgaccccgctgcgcacggcctgtccgctgcacaccagcttgttggcgtcttcgtcgccgcgctcgccccgggctactcctgcgcgccacaatgagctcccgcatcgccagggcgctcgccttagtcgtcacccttctccacttgaccaggctggcgctctccacctgccccgctgcctgccactgccccctggaggcgcccaagtgcgcgccgggagtcgggctggtccgggacggctgcggctgctgtaaggtctgcgccaagcagctcaacgaggactgcagcaaaacgcagccctgcgaccacaccaaggggctggaatgcaacttcggcgccagctccaccgctctgaaggggatctgcagagctcagtcagagggcagaccctgtgaatataactccagaatctaccaaaacggggaaagtttccagcccaactgtaaacatcagtgcacatgtattgatggcgccgtgggctgcattcctctgtgtccccaagaactatctctccccaacttgggctgtcccaaccctcggctggtcaaagttaccgggcagtgctgcgaggagtgggtctgtgacgaggatagtatcaaggaccccatggaggaccaggacggcctccttggcaaggagctgggattcgatgcctccgaggtggagttgacgagaaacaatgaattgattgcagttggaaaaggcagctcactgaagcggctccctgtttttggaatggagcctcgcatcctatacaaccctttacaaggccagaaatgtattgttcaaacaacttcatggtcccagtgctcaaagacctgtggaactggtatctccacacgagttaccaatgacaaccctgagtgccgccttgtgaaagaaacccggatttgtgaggtgcggccttgtggacagccagtgtacagcagcctgaaaaagggcaagaaatgcagcaagaccaagaaatcccccgaaccagtcaggtttacttacgctggatgtttgagtgtgaagaaataccggcccaagtactgcggttcctgcgtggacggccgatgctgcacgccccagctgaccaggactgtgaagatgcggttccgctgcgaagatggggagacattttccaagaacgtcatgatgatccagtcctgcaaatgcaactacaactgcccgcatgccaatgaagcagcgtttcccttctacaggctgttcaatgacattcacaaatttagggactaaatgctacctgggtttccagggcacacctagacaaacaagggagaagagtgtcagaatcagaatcatggagaaaatgggcgggggtggtgtgggtgatgggactcattgtagaaaggaagccttgctcattcttgaggagcattaaggtatttcgaaactgccaagggtgctggtgcggatggacactaatgcagccacgattggagaatactttgcttcatagtattggagcacatgttactgcttcattttggagcttgtggagttgatgactttctgttttctgtttgtaaattatttgctaagcatattttctctaggcttttttccttttggggttctacagtcgtaaaagagataataagattagttggacagtttaaagcttttattcgtcctttgacaaaagtaaatgggagggcattccatcccttcctgaagggggacactccatgagtgtctgtgagaggcagctatctgcactctaaactgcaaacagaaatcaggtgttttaagactgaatgttttatttatcaaaatgtagcttttggggagggaggggaaatgtaatactggaataatttgtaaatgattttaattttatattcagtgaaaagattttatttatggaattaaccatttaataaagaaatatttacctaatatctgagtgtatgccattcggtatttttagaggtgctccaaagtcattaggaacaacctagctcacgtactcaattattcaaacaggacttattgggatacagcagtgaattaagctattaaaataagataatgattgcttttataccttcagtagagaaaagtctttgcatataaagtaatgtttaaaaaacatgta

SEQ ID NO: 53 - DNA, 1072 bp, Homo sapiens
  misc_feature: Incyte ID No: 333484.5
  unsure 46: a, t, c, g, or other
tgttaataagccaatagcgatgaactgctccaacctctggggaaanttcagttatggatcaatctgctctttccattgtctagagggccagttacttaatggctctgcacaaacagcatgccaagagaatggccactggtcacctaccgtgccaacctgccaagcaggaccattgactatccaggaagccctgacttactttggtggagcggtggcttctacgataggtctgataatgggtgggacgctcctggctttgctaagaaagcgtttcagacaaaaagatgatgggaaatgccccttgaatcctcacagccacctaggaacatatggagtttttacaaacgctgcatttgacccgagtccttaagagacctgtccttttcctggtctcctcattcagcctccatatgatcctgttgtgaacatcaagtttcctgctacactggacttaactataatgcatttgctgcaggtttccataaacacccatgaatcaaagacatggaattaccttagattagctctggaccagcctgttggacccgctctggaccaaccctgtttcctgagtttgggattgtggtacaatctcaaattctcaacctaccaccccttcctgtcccacctcttctcttcctgtaacacaagccacagaagccaggagcaaatgtttctgcagtagtctctgtgctttgactcacctgttacttgaaataccagtgaaccaaagagactggagcatctgactcacaagaagaccagactgtggagaaataaaaatacctctttattttttgattgaaggaaggttttctccactttgttggaaagcaggtggcatctctaattggaagaaattcctgtagcatcttctggagtctccagtggttgctgttgatgaggcctcttggacctctgctctgaggcttccagagagtcctctggatggcaccagaggctgcagaaggccaagaatcaagctagaaggccacatgtcaccgtggaccttcctgccaccagtcactgtccctcaaatgacccaaagaccaatattcaaatgcgtaaaaaa

SEQ ID NO: 54 - DNA, 2607 bp, Homo sapiens
  misc_feature: Incyte ID No: 138709.5
ggaggctgtctcctgtgtagtgtatatttatctgtaagtgagccgttggggaaggattgaatacagagacgctgtctgcttgctggccttaagacagctagctgaattgctgattaacttttaaaatacccagcttggtttatttttcttagaatctgttgctaagactggggacgctgttttcttttacaaagggaaatctaagttaatttcaaggcattcgaaatggggaaagactattattgcattttgggaattgagaaaggagcttcagatgaagatattaaaaaggcttaccgaaaacaagccctcaaatttcatccggacaagaacaaatctcctcaggcagaggaaaaatttaaagaggtcgcagaagcttatgaagtattgagtgatcctaaaaagagagaaatatatgatcagtttggggaggaagggttgaaaggaggagcaggaggtactgatggacaaggaggtaccttccggtacacctttcatggcgatcctcatgctacatttgctgcatttttcggagggtccaacccctttgaaattttctttggaagacgaatgggtggtggtagagattctgaagaaatggaaatagatggtgatccttttagtgcctttggtttcagcatgaatggatatccaagagacaggaattctgtggggccatcccgcctcaaacaagatcctccagttattcatgaacttagagtatcacttgaagagatatatagtggttgtaccaaacggatgaagatttctcgaaaaaggctaaacgctgatggaaggagttacagatctgaggacaaaattcttaccattgagattaaaaaagggtggaaagaaggcaccaaaattacttttccaagagaaggagatgaaacaccaaatagtattccagcagacattgtttttatcattaaagacaaagatcatccaaaatttaaaagggatggatcaaatataatttatactgctaaaattagtttacgagaggcattgtgtggctgctcaattaatgtaccaacactggatggaagaaacatacctatgtcagtaaatgatattgtgaaacccggaatgaggagaagaattattggatatgggctgccatttccaaaaaatcctgaccaacgtggtgaccttctaatagaatttgaggtgtccttcccagatactatatcttcttcatccaaagaagtacttaggaaacatcttcctgcctcatagaatgaagaactttgttacacatattttgataaggcactgaaaatataaaaggactggtagtttactgatgtagatgtgaattctgtataaagatgtgtaaattcttttgagggttcattaaattgcatgaatagagacgggtcaaataaataggcaaaagggatttttacagttagagataaaagagaaaaccattcactgtattttatttcatttctcctgattcagatatttttagtaatttgcttatatgtaaaagttgtttttgtggagtcagtggatatatttctaatgaagtgctagactatccaattacttaatttcttatacctttagataatcagtatgaaaagttcccatttataatggaaatgaaaattcttaactaaactatacatgtaatatgtatttctagaagagaataaaaacccaagtcagttattagatttaaatcaccttctgaaatgctgctatagggctggtatctgtaaaagaatatcctgatgcatctgtttcaccattttgatttttaaagtatgctgtagcatttcttaataacatcgttgtgatgttcttaaggcagatctttcttcataaaaaggaaagtaatggcaatttctctcctgtggaaatcccaattgcttgaattactgatattttagaatagactttttaaaatgccatatgtaattttatgcaagttgactatatatcttgtacttaataaattataggctcattttgttctctgctagtttaaagtaattcgtttaataatagatgtgtttttagaggaaatgctgttacttggaattaattttccagttatacagtcttctataacttactaataatattctatatgtactttatgtaatttccctaaaaagaatgaactaccactacactatggtgttaaaccaaaatatagggaaaataaacactaactgctgcttatggataatgttgcaactacttgttatgcatataaatattttactttttcacatgtatagattgcatttcttaggtgttttaattttttaaatatatttatgttttaaaaatttagttttgttttctgttttataactatagtgagaatgatgttttgaagcaaaatttttggttataaaatagttttcaggattatatatatatatactggatcctatcgccttttagtagaatatgaaatattcttttagaaatccaatataaataggttataatagccatattctttattactttattgagatataatttacatgccataaagtttacccttaaaatagataattcagtggtttttagtgatatttacaaagtggtacaatcatcatcactttctaattccagaatatt

SEQ ID NO: 55 - DNA, 1117 bp, Homo sapiens
  misc_feature: Incyte ID No: 282397.110
ctttattaagagtagagtaatactacttatcatggctcatttcacctgtgtacatgatggactggatctccaatttcattttaattctaggtgggaatgatggttagatgctgccgaacatacgaagaagtgtgcgaaggtgatgtgatgttggcaaagtcatcaagctggacagagatggattgcatgatctcaatgtgcagtgtgactggcagcagaaagggggcatctactggtttaggtacattcatgtggaacttataggctatcctccaccaagaagttcttctcacatcaagattggtgataaagtgcgggtcaaagcctctgtcaccacaccaaaatacaaatggggatctgtgactcatcagagtgtgggggttgtgaaagtgccaatggaaaagatatcattgttgactttccccagcagtctcactggactgggttgctatcagaaatggagttggtgcccagtattcatcctggggttacgtgtgatggatgtcagatgtttcctatcaatggatccagattcaaatgcagaaactgtgatgactttgatttttgtgaaacgtgtttcaagaccaaaaaacacaataccaggcatacatttggcagaataaatgaaccaggcttcagcagaagaaacacttcctataaatctcgcccaaacaggaaaggagaagcatcagggtgtccgactacgtgggtttcatagctgtggaaaagccaaaggggagactcctgaagaaaggcggtgaagactgtgaagagcgggtcaggaagatgagcacagcactgctactcctgtgggcacagggacagcatgtctccagccagcgccaccttgtttaatacatgggaactcactgaaattcattctgtattttgcccgcaaagttttaaagctttcatccacagtcaggaattaaacttataccaatgagagcctcacacattcaaggatgtactaagcactacaggcctcacagaaacagagatcccatcttggagttttcagtaccacatgggagataaaggggtttgaacatgaaatgacaaaaacaacagcaagaagaaaattctcgtcctttttcattactatcaaactcaaata

SEQ ID NO: 56 - DNA, 1521 bp, Homo sapiens
  misc_feature: Incyte ID No: 1996323CB1
attaaccaactgagatccagttcaggggtgaaagttcttcaggtacgaggagggcattgttgtcagtctggaccgagcccgcagagcccctcctcggcgtcctggtcccggccgtgcccgcggtgtcccgggaggaaggggcgggccgggggtcgggaggagtcacgtgccccctcccgccccaggtcgtcctctcagcatgggggtcccgcggcctcagccctgggcgctggggctcctgctctttctccttcctgggagcctgggcgcagaaagccacctctccctcctgtaccaccttaccgcggtgtcctcgcctgccccggggactcctgccttctgggtgtccggctggctgggcccgcagcagtacctgagctacaatagcctgcggggcgaggcggagccctgtggagcttgggtctgggaaaaccaggtgtcctggtattgggagaaagagaccacagatctgaggatcaaggagaagctctttctggaagctttcaaagctttggggggaaaaggtccctacactctgcagggcctgctgggctgtgaactgggccctgacaacacctcggtgcccaccgccaagttcgccctgaacggcgaggagttcatgaatttcgacctcaagcagggcacctggggtggggactggcccgaggccctggctatcagtcagcggtggcagcagcaggacaaggcggccaacaaggagctcaccttcctgctattctcctgcccgcaccgcctgcgggagcacctggagaggggccgcggaaacctggagtggaaggagcccccctccatgcgcctgaaggcccgacccagcagccctggcttttccgtgcttacctgcagcgccttctccttctaccctccggagctgcaacttcggttcctgcggaatgggctggccgctggcaccggccagggtgacttcggccccaacagtgacggatccttccacgcctcgtcgtcactaacagtcaaaagtggcgatgagcaccactactgctgcattgtgcagcacgcggggctggcgcagcccctcagggtggagctggaatctccagccaagtcctccgtgctcgtggtgggaatcgtcatcggtgtcttgctactcacggcagcggctgtaggaggagctctgttgtggagaaggatgaggagtgggctgccagccccttggatctcccttcgtggagacgacaccggggtcctcctgcccaccccaggggaggcccaggatgctgatttgaaggatgtaaatgtgattccagccaccgcctgaccatccgccattccgactgctaaaagcgaatgtagtcaggcccctttcatgctgtgagacctcctggaacactggcatctctgagcctccagaaggggttctgggcctagttgtcctccctctggagccccgtcctgtggtctgcctcagtttcccctcctaatacatatggctgttttccacctcgataatataacacgagtttgggcccgaaaaaaaaaaaa

SEQ ID NO: 57 - DNA, 1718 bp, Homo sapiens
  misc_feature: Incyte ID No: 1383218.12
  unsure 868, 873, 881, 1207: a, t, c, g, or other
ccccagtgccccaatgggatgaaccaccaccagaaagagcccaactgagtgtggggtggggtggccctgcaggatgtcacatgaagagccccatgagatgggagagaggagcatacgtcgggcggggtgagacatgacccaggcatgcagtctctcttcaccctgccgtcatgtctaagtcagagtctcctaaagagcccgaacagctgaggaagctcttcattggagggttgagctttgaaacaactgatgagagcctgaggagccattttgagcaatggggaacgctcacggactgtgtggtaatgagagatccaaacaccaagcgctccaggggctttgggtttgtcacatatgccactgtggaggaggtggatgcagctatgaatgcaaggccacacaaggtggatggaagagttgtggaaccaaagagagctgtctccagagaagattctcaaagaccaggtgcccacttaactgtgaaaaagatatttgttggtggcattaaagaagacactgaagaacatcacctaagagattattttgaacagtatggaaaaattgaagtgattgaaatcatgactgaccgaggcagtggcaagaaaaggggctttgcctttgtaacctttgacgaccatgactccgtggataagattgtcattcagaaataccatactgtgaatggccacaactgtgaagttagaaaagccctgtcaaagcaagagatggctagtgcttcatccagccaaagaggtcgaagtggttctggaaactttggtggtggtcgtggaggtggtttcggtgggaatgacaacttcggtcgtggaggaaacttcagtggtcgtggtggctttggtggcaagcccgnggtgntggtcggntatggtgcagtggggatggctataatggatttggtaatgatggtggttatggaggaggcggccctggttactctggaggaagcagaggctatggaagtggtggacagggttatggaaaccagggcagtggctatggcgggagtggcagctatgacagctataacaacggaggcggaggcggctttggcggtggtagtggaagcaattttggaggtggtggaagctacaatgattttgggaattacacaatcagtcttcaaattttggacccatgaagggaggaaattttggagcagaagctctggcccctatggcggtggaggccnatactttgccaaaaccccgaaacccaggtggctatggcggttccagccagcagccagtagctatggccagtggccagaagattttaattaggaaaccaaagcttagccggagaggagagcccagagaagtgaccgggaagctaccaggttaccaaccagatttgtgaactccagcccagccccagtggtggccgggcctagctgctaccaagaagacatgttttagaccaaatactcatgtgtatgggccaaaaaactcgaggactgtatttgtgactaattgtataaccaggttattttagtttctgttctgtggaaagtgtaaagccattcccaaccaagggttttaatgtagatttttttttttgcaccccatgctgttgattgctaaatgtaacagtctgatcgtgacgctgaataaatgtctttttttttaatgtgctgtgtaaagttagtctactcttaagccatcttggtaaatttccccactagtgtgaagttagaattcctc

SEQ ID NO: 58 - DNA, 1002 bp, Homo sapiens
  misc_feature: Incyte ID No: 230345.3
  unsure 23, 994: a, t, c, g, or other
ggcggcgcggcgcggccgtaagngtggccgggtgtcgtgaggcgggccttcgggctggctcgccgtcggctgccggggggttggcctgggtgtcattggctctgggaagcggcagcagaggcagggaccactcggggtctggtgtcggcacagccatggcgggcgcgttggtgcggaaagcggcggactatgtccgaagcaaggatttccgggactacctcatgagtacgcacttctggggcccagtagccaactggggtcttcccattgctgccatcaatgatatgaaaaagtctccagagattatcagtgggcggatgacatttgccctctgttgctattctttgacattcatgagatttgcctacaaggtacagcctcggaactggcttctgtttgcatgccacgcaacaaatgaagtagcccagctcatccagggagggcggcttatcaaacacgagatgactaaaacggcatctgcataacaatggaaaaggaagaacaaggtcttgaagggacagcattgccagctgctgctgagtcacagatttcattataaatagcctccctaaggaaaatacactgaatgctatttttactaaccattctatttttatagaaatagctgagagtttctaaaccaactctctgctgccttacaagtattaaatattttacttctttccataaagagtagctcaaaatatgcaattaatttaataatttctgatgatggttttatctgcagtaatatgtatatcatctattagaatttacttaatgaaaaactgaagagaacaaaatttgtaaccactagcacttaagtactcctgattcttaacattgtctttaatgaccacaagacaaccaacagctggccacgtacttaaaattttgtccccactgtttaaaaatgttacctgtgtatttccatgcagtgtatatattgagatgctgtaacttaatggcaataaatgatttaaatatttgttanaaaaaaaa

SEQ ID NO: 59 - DNA, 1620 bp, Homo sapiens
  misc_feature: Incyte ID No: 019238.3
ggcgttcccactgcaccctggagaacgagcctttgcggggtttctcctggctgtcctccgaccccggcggtctcgaaagcgacacgctgcagtgggtggaggagccccaacgctcctgcaccgcgcggagatgcgcggtactccaggccaccggtggggtcgagcccgcaggctggaaggagatgcgatgccacctgcgcgccaacggctacctgtgcaagtaccagtttgaggtcttgtgtcctgcgccgcgccccggggccgcctctaacttgagctatcgcgcgcccttccagctgcacagcgccgctctggacttcagtccacctgggaccgaggtgagtgcgctctgccggggacagctcccgatctcagttacttgcatcgcggacgaaatcggcgctcgctgggacaaactctcgggcgatgtgttgtgtccctgccccgggaggtacctccgtgctggcaaatgcgcagagctccctaactgcctagacgacttgggaggctttgcctgcgaatgtgctacgggcttcgagctggggaaggacggccgctcttgtgtgaccagtggggaaggacagccgacccttggggggaccggggtgcccaccaggcgcccgccggccactgcaaccagccccgtgccgcagagaacatggccaatcagggtcgacgagaagctgggagagacaccacttgtccctgaacaagacaattcagtaacatctattcctgagattcctcgatggggatcacagagcacgatgtctacccttcaaatgtcccttcaagccgagtcaaaggccactatcaccccatcagggagcgtgatttccaagtttaattctacgacttcctctgccactcctcaggctttcgactcctcctctgccgtggtcttcatatttgtgagcacagcagtagtagtgttggtgatcttgaccatgacagtactggggcttgtcaagctctgctttcacgaaagcccctcttcccagccaaggaaggagtctatgggcccgccgggcctggagagtgatcctgagcccgctgctttgggctccagttctgcacattgcacaaacaatggggtgaaagtcggggactgtgatctgcgggacagagcagagggtgccttgctggcggagtcccctcttggctctagtgatgcatagggaaacaggggacatgggcactcctgtgaacagtttttcacttttgatgaaacggggaaccaagaggaacttacttgtgtaactgacaatttctgcagaaatcccccttcctctaaattccctttactccactgaggagctaaatcagaactgcacactccttccctgatgatagaggaagtggaagtgcctttaggatggtgatactgggggaccgggtagtgctggggagagatattttcttatgtttattcggagaatttggagaagtgattgaacttttcaagacattggaaacaaatagaacacaatataatttacattaaaaaataatttctaccaaaatggaaaggaaatgttctatgttgttcaggctaggagtatattggttcgaaatcccagggaaaaaaataaaaataaaaaattaaaggattgttgataa

SEQ ID NO: 60 - DNA, 1377 bp, Homo sapiens
  misc_feature: Incyte ID No: 034470.4
gggagggagggctggccgctcccaccctctcgcgcctggctgtgctctccggatgctcggccctgcgagcgctcagcctcaggggcacggcagtggggtggggaccgactgggccgcgccggggtggggagagaggcaggtcccaggattctgggtcccgactccagtcctgcctggtccacagactgcgagaggaccccggcgtccgggctcccggtgccagcgctatgaggccactcctcgtcctgctgctcctgggcctggcggccggctcgcccccactggacgacaacaagatccccagcctctgcccggggcaccccggccttccaggcacgccgggccaccatggcagccagggcttgccgggccgcgatggccgcgacggccgcgacggcgcgccccggggctccgggagagaaaggcgaggggggaggccgggactgccgggacctcgaggggaccccgggccgcgaggagaggcgggacccgcggggcccaccgggcctgccggggagtgctcggtgcctccgcgatccgccttcagcgccaagcgctccgagagccgggtgcctccgccgtctgacgcacccttgcccttcgaccgcgtgctggtgaacgagcagggacattacgacgccgtcaccggcaagttcacctgccaggtgcctggggtctactacttcgccgtccatgccaccgtctaccgggccagcctgcagtttgatctggtgaagaatggcgaatccattgcctctttcttccagtttttcggggggtggcccaagccagcctcgctctcggggggggccatggtgaggctggagcctgaggaccaagtgtgggtgcaggtgggtgtgggtgactacattggcatctatgccagcatcaagacagacagcaccttctccggatttctggtgtactccgactggcacagctccccagtctttgcttagtgcccactgcaaagtgagctcatgctctcactcctagaaggagggtgtgaggctgacaaccaggtcatccaggagggctggcccccctggaatattgtgaatgactagggaggtggggtagagcactctccgtcctgctgctggcaaggaatgggaacagtggctgtctgcgatcaggtctggcagcatggggcagtggctggatttctgcccaagaccagaggagtgtgctgtgctggcaagtgtaagtcccccagttgctctggtccaggagcccacggtggggtgctctcttcctggtcctctgcttctctggatcctccccaccccctcctgctcctggggccggcccttttctcagagatcactcaataaaccatcctggttaggatgtactctgttcttgaacaacatacaa

SEQ ID NO: 61 - DNA, 10758 bp, Homo sapiens
  misc_feature: Incyte ID No: 205855.10
  unsure 10700: a, t, c, g, or other
acaccgcccgctgggcccacaaaatgggggagactacggcgtccagccggtgaggccacaggagggcaaactttaggccggcttggcccaggaacgacacgaagacagagccagagaatggtctgagcccgcagacgccgccaccacctccgccgctgaggagactctgggcttaaggacatcgccgctgccgcgccgggggcctgggcttctctcccggttctcgcccttcccgctcctgtgcgggcgcctctccgcccgggagaaccgtcctgggcttgggttctgccgtctcggacttgattttgattatttattgtgtaatttattatttttcttgtggcgccggcggcggctgctgtgagggacgatgagtgcctccttcgtgccgaacggggccagcctggaagattgtcactgtaacctcttctgcctggctgacttgacaggaattaagtggaaaaaatatgtatggcaaggcccaacttctgcccctattctgtttcctgtgacagaagaagaccccattttgagcagttttagtcgctgccttaaggcagatgtacttggtgtttggcggcgagatcaaagacctggaagaagagaattgtggatattttggtggggtgaagaccccagttttgctgaccttattcaccatgacttatcagaagaagaagatggaatgtgggagaatggactttcctatgaatgccgtactctgcttttcaaagcagttcacaatctattggaacggtgtttaatgaacaggaattttgtacgtattggcaagtggtttgtaaagccttatgaaaaagatgaaaaacctataaataaaagtgaacacttgtcctgctccttcacctttttcttgcatggagacagcaatgtttgtaccagtgtggaaattaaccaacatcaacctgtataccttctcagtgaagagcatatcacccttgctcaacagtctaatagcccatttctagttatcttatgcccatttggactaaatggcactctcacaggacaggcattcaagatgtctgattcagctacaaaaaaattaattggtgaatggaaacagttctatcctatctcatgttgcttgaaggagatgtctgaagaaaaacaggaagatatggattgggaagatgattctttagctgcagtagaagttcttgttgctggtgtccgaatgatctacccagcatgctttgttctagtccctcagtcagacattcctactcctagccctgtgggatccactcactgttcatcttcttgcttgggtgtccaccaagtgcctgcttccacaagagatcctgctatgtcttcggttacgcttacaccacctacgtctcctgaggaagtccaaacagttgatcctcagtctgtccagaagtgggtcaaattttcttcagtatctgatggcttcaactccgatagtactagccaccatggtgggaaaataccccagaaaattagcaaatcatgtggtggatagagtttggcaagaatgcaatatgaacagagcacagaacaagaggaagtattctgcttcatcaggtggtctatgcgaagaagcgacagctgctaaagtggcatcctgggattttgttgaagccacacaaagaacaaattgcagttgtttgaggcacaaaaatctcaagtcaagaaatgctggacaacaaggacaggcaccatctttaggtcagcaacaacaaatacttcctaagcacaagaccaatgagaagcaagaaaagagtgaaaagccacagaaacgccccttgactccttttcaccatcgtgtgtctgttagtgatgatgttggcatggacgcagattcagccagccaaagacttgtgatctctgctccagacagtcaagtgagattttcaaatatccgaactaatgatgtagcaaagactcctcagatgcatggcaccgaaatggcaaattcacctcaaccacccccacttagtcctcacccttgtgatgtggttgatgaaggagtgactaaaacaccttcaactcctcagagtcaacatttttatcaaatgccaacaccagatcccttggttccttctaaaccaatggaagataggatagacagtttgtcccagtctttcccacctcaatatcaggaagctgtagaacctacagtatatgttggtacagcagtaaacttggaagaagatgaagccaatatagcctggaagtattacaagttcccaaagaaaaaagatgtagagtttttaccacctcaacttccaagtgataaattcaaggatgatccagttggaccttttggacaggaaagtgtaacatcagttacagagttaatggtgcaatgtaagaaacctttaaaagtttctgatgaattagtgcagcaatatcaaattaaaaaccagtgtctttcagcaatagcatctgatgcagaacaagaacctaaaattgatccatatgcatttgttgaaggagatgaggaattcctttttcctgataaaaaagatagacaaaatagtgagagagaagctggaaaaaaacacaaggtagaagatgggacatctagtgtaacagtgttatcacatgaagaagatgctatgtcattatttagtccctctatcaagcaagatgctccacgccctactagtcatgcccgtcctccatcaacaagtttgatttatgactcagacctggctgtctcttatactgaccttgataatctcttcaattctgatgaagatgaactaacacctggatctaaaagatcagcaaatggatcagatgataaagccagctgcaaggaatcaaagacaggaaatctggacccgttatcttgcataagcactgcagatcttcataaaatgtatcctacaccaccatcattggaacaacatattatgggattttccccaatgaatatgaataataaagaatatggtagtatggatacaacacctggaggaactgttctagaaggaaatagttctagtataggagcgcagttcaaaattgaggttgatgagggattctgtagccccaaaccttctgaaattaaagatttttcttatgtctataagcctgaaaattgtcaaattctagtgggatgttccatgtttgcacctctaaaaactctaccaagccaatatctgccccttatcaaattgccagaagagtgtatttaccgtcagagttggactgttggaaaattggaattgctttcttcagggccttcaatgccattcatcaaagagggtgatggaagtaatatggatcaagaatatggcactgcttatacacctcaaactcatacttcttgtgggatgcctcctagcagtgcacctcctagtaacagcggagcaggaattcttccttctccatccacccctcggtttccaactccaaggactccaaggactcctcggactcctcgtggagctggtggacctgctagtgctcaaggttcagtcaaatatgaaaattcagacttgtattcaccagcttctaccccatctacatgcagaccccttaattctgttgaacctgcaactgtcccttccatccctgaagcacacagtctttatgtaaacctcatcctttcagaatcagttatgaatttgtttaaagactgtaactctgatagttgttgcatctgtgtttgcaacatgaacatcaagggtgccgatgttggagtttacattccagatccaacgcaggaagcacaatataggtgtacctgtggcttcagtgctgtcatgaacagaaaatttggaaacaattcaggattatttcttgaagatgaactagatatcataggacgcaatacagactgtggcaaagaagcagaaaaacgttttgaagctctcagggctacctctgctgaacatgttaatggaggactaaaggaatctgaaaaattatctgatgatttgatattattgctacaagatcagtgcactaatttattttcaccctttggagcagcagaccaagatccttttcctaaaagtggtgtaattagcaattgggtacgtgttgaagagcgtgactgttgcaatgactgctaccttgcattagaacatgggcgtcagttcatggataacatgtcaggaggaaaagttgatgaagcacttgtgaaaagttcatgcttacacccctggtccaaaagaaacgatgtgagtatgcagtgctcacaggatatacttcgaatgctcctctctcttcagccagttcttcaggatgccattcagaaaaaaagaacagtaagaccttggggtgttcagggtcctctcacttggcaacaatttcataaaatggctggccgaggctcttatggaactgatgaatccccagaaccactgccaatccccacatttttgttgggttatgattatgattatctggtgctttctccatttgctcttccttattgggagagacttatgctggaaccctatggatctcaaagagatatagcctatgttgtactgtgtccagaaaatgaagccttgttaaatggagcaaaaagcttttttagagatcttactgcaatatatgagtcctgtcgattaggtcaacatagacctgtttctcgactgttaacagatgggatcatgagagttggatctactgcatcaaagaaactatcagaaaagttggtagcagaatggttttctcaggcagctgatggtaacaatgaagcattttctaaactcaagctttatgcacaagtctgcagatatgacctaggtccttatcttgcttccctgccattggacagctctctactttcccagccaaatttagttgcccctacaagtcagtctttgattactccacctcagatgacaaatactggaaatgctaatactccatctgccaccttagcatctgcagcgagcagcactatgacagtgacttcaggtgttgccatatctacttcagttgccacagctaattcaactttgaccacagcttcaacttcatcttcatcatcctccaacttgaatagtggagtatcatcaaataaactaccttcgtttccaccctttggcagtatgaacagtaatgctgcaggatccatgtctacacaagcaaatacagttcagagtggtcagctaggagggcaacagacatcagctctacagacagctgggatttctggagaatcatcttcacttcccactcagccgcatcctgatgtgtctgaaagcacgatggatcgggataaagtgggaatccccacagatggtgattcacatgcagtcacgtatccacctgcaattgttgtttatataattgatccttttacatacgaaaatacagacgagagcactaactcttctagtgtgtggacattggggctacttcgatgctttctagaaatggtccagactcttcctcctcatatcaagagtactgtttctgtacagattattccttgtcagtacctgttgcaacctgtgaagcatgaagatagagaaatctatccccagcatttaaaatccctggctttttcggcctttacccagtgtcggaggccacttccaacatcaaccaatgtgaaaacattgactggctttggtccaggtttagccatggaaactgcccttagaagtcctgatagaccagagtgtattcgactttatgcacctccttttattctggctccagtgaaggacaaacagacagagctaggagaaacatttggagaagctggacagaaatataatgttctttttgtgggatactgtttatcacatgatcaaaggtggattcttgcatcttgcacagatctatatggagaacttttagaaacttgtatcattaacatcgatgttccaaatagggctcgtcggaaaaaaagttctgctagaaaatttggtctacagaaactttgggagtggtgcttaggacttgtacaaatgagttcattgccatggagagttgtaattggtcgtctaggaaggattggtcatggagaattgaaagattggagctgtttgctgagtcgtcgaaacttgcagtctctaagtaaaaggctcaaagacatgtgtagaatgtgtggtatatctgctgcagactcccctagcattctcagtgcttgcttggtggcaatggagccgcaaggctcttttgttattatgccagattctgtgtcaactggttctgtatttggaagaagcacgactctaaatatgcagacatctcagctaaataccccacaggatacatcatgtactcatatacttgtgtttcctacttctgcttctgtgcaagtagcttcagctacttataccactgaaaatttggatttagctttcaatcccaacaatgatggagcagatggaatgggtatctttgatttgttagacacaggagatgatcttgaccctgatatcattaatatccttcctgcttctccaactggttctcctgtacattctccaggatctcattacccccatggaggtgatgcgggcaagggtcagagtactgatcggctactatcaacagaacctcatgaggaagtacctaatattcttcagcaaccattggcccttggttactttgtatcaactgccaaagcaggtccattacctgactggttctggtcagcatgtcctcaagcacaatatcagtgtcccctttttcttaaggcctctttgcacctccacgtgccttcagtgcaatctgacgagctgcttcacagtaaacactcccacccacttgactcaaatcagacttcagatgtcctcaggtttgttttggaacagtacaatgcactctcctggctaacctgtgaccctgcaacccaggacagacgctcatgtctcccaattcattttgtggtgctgaatcagttatataactttattatgaatatgctgtgatcttcatttgatggaactgtgcaagaaaagaacaaggaaaaatggatgtttcgctgcaggattaagttacaattatcttctcagtgaaggtcatttgtgatggggtctaattcttattacttcaacaaatattgttttgacttggggggaggggctataaccctgctatttttcattgactctattgaactctttaggatgatgactgatcatacaaaacgtattataacattttcgtagcaaaattaaccttttttttttccagtcacagtatttgtgaaaagtaatgagccatagtacccagtcatgttaaatgaatattaaaagcatggagaggaaacatgaggaacaatgaatttcaacatatggcttcagaacatgaagatgttcttgtatggattatagtatctagtattcaaaaatgcctgcatctcttctcttatttattgtaagtttttaaatgtataaattgtcttatatttcttaacctcttttataaaaattttcctagaaggtttatactgccttcttgctttaaagcaattggtctaaaatatatgtaatcgtcttaattaaaaagttgcagtagggttgcttttagagtattatttttttgtaagggggtgggtgggacagtaaatttgtattgtctcgatgtacagtttaacggggatagagggggaatagtgtccataccattgtgtgtggaggatttacagctaagctgtagttgcagagtacatgtacagtaatgaagttcactgtgtttataaattgaaaaggtaccaggtcttacagcattttatatatcacatctttacagaataacatgatggcaatatacaagtggtattgttaggtggtttaacttagaataaaatgagaattcttcagttatattttgtactatggtttagggctatgactaatatttcaggccatttccggtgaaagaaacttagttttacaagaaaaaccatttgctactgaatgcttaaactaattttagtgtttaatgttacatgcttaaatttttttcagttttaacagtggcatatttaggcatggaaatattattatgaaatttattttcaggatctgctataaggttgaaatttagcccagctctaggcattttacaaattatttttcaagcagtcattcttgattgtttgacttttttttttaaattaaagattgggaatgtatgtgagagtatgcatatgtatggggtgtgtgtgtgtgcccgcaatcaaactgtggtgtaaatagattctcagtgaattctggtattcagactctattccactagtgaaagaaccattttttaaacttcccttgccttttttatttatttaattttcttggtttggagatgtcagtcccaaacaccagagtctgtacttttctataacacagctcagattaaggtagggcatatgccaaggaggttctcacctccctaaagaagggacttgaattttagggactttaattcacccctccttcaatacaactttcccccttcttgtttgcacatgccaagataactgcttttatgcaggctgtacccccttgaaaaatcctttctacagtgctgctcacaaaagagcccaagttcgcctcctacctgcattgctgacttgaattcacagtcgccgagtctacctagctttcttggaagcagtctagcaaaatttctatttgtacgttcactaattatctacaaggacaaaatcagttgtatttacaaaactctacttcagtgtttgttttagtttttttttttactgaaacttgtttttgtgaatactctgtgcttagaattaaatatcactttcttatgaacaacataacttcttcagattgtgtatatgaaaacattagcaagtcttgttttttctatgaagcaaacacaattggtgacaaaggttgtcaatcatttcttcaaaattataatgcagttctaatggtcagcatattttgatattaaatttaaagatcacctctctgcatttgtttttaaattatgctaatacaccacacattatgttggtatgttttgttctgtactttctttaaaaaaaaaaaaaaaacttgtctgagatttgaaggaaaatgtgcttatttggaatttccataaaaagagtatcctttttatacacttaatagtgactttacaaaataaaagttatattctcagttgtttaaaatcactaacctatgataaccacacctcaatttgaaagtagatttaaaattattccctgacaggttatttaatatggagccataaggagggaacccagtacacaattattttttatttgggaatcagggaatagttcccaaatatacaggatttattgataagattttttttcttcccttcatatatccattcaaactcaatggaaagttattaaataaccattagaaaagctcagtagacttatttgagaaattaagccttgtgcaggatgatggatttgacttactaatgtactgtcacagacaaatatgggtagttttgtttaaataggtaagcaaaatattatactttatagcagtggattaccaacaccttgacttctttgttacagtgctaacatctttttttttgtgcaggtatccatgattattaagcagggtggaagttcagtattttgtcatttaaaaagattagttatataatgtctgcttccagccagtgagaaacatctagccatacctttcttatgcaagccattgagttatcaggactgtgaattaacactgtatgaataaatttctgtacaccttattgtttggccagaaggccaccaagtgtacttatatgtaatccttaaattttaaagtagctgtaatttttaaatatttctaaacttttcttaaaccactaaaattaagctcttactacttagtcaactatcctcagctgtattcgtactcaattgtcagtatggcacagattactgtattaaaatattctcctttcgtcttcatatttaccttctgaggtaattttttaacttaatgtgttactacaaagatttgcagatctttaatcaagcactatgttaatactgtaatatcagaatactatgttgcattatttaaaatgttcaaattgaatagattaaaaagtttttaaatgctattgcatcatataatttgctattcatccactatggcattgcatatcaatcagttaatacacttaatgttgcatgagtgatattttggtctgggtttcctcttaagattttagtttgtctgaattaaggaaaaatgtttttaatatacattcttattttgtcccacccctccagaaataagctggaaatcttaactttttggggggtcttttttggtgttttaatgggcccagaactgtggtttaaatttttatgtatgtattttcttttttgtggagtataaatttaaaaactggatttgggacctaaaatactcctcaggttgatgtattcatgaagttttaaaacatctttagttttcaaagtaaactggatatgtggaccttaaagttattgagtttaagctacaaattgtaacgtcattactggacatgtcagcatcaaccctctcaaaatagcttggtcactttatgaaggggcgttttaaagttgttgtttagcagtgacatttaatatggtccaattgcttttctttttaacgtgacaaaaagagaataaggaacaaacactattgctgccgaatgccataacactgagttgtacaaattgtgattgaggaaatgaaaaggtttatactttttaaaanaaaaaaaacaaaaacaaaaaacaaaacttcaaatggaataaattattcatgaagcctt

SEQ ID NO: 62 - DNA, 2438 bp, Homo sapiens
  misc_feature: Incyte ID No: 236624.2
tggttataaattcaaagagcttgaaaagattgaagagggcccaacactgatgatttgtggaaaagaaatagaagtcatgggtgaatctctccagatgacttcagcagtggcaggtgttttcagcttggaggaggaagtactgctatctcgcattcttctcaggttgccaggaaatgtttctctaaccctttcaaaagtgtttgtaaaccaagttcaaaggaaaatagacagaatgatttccaaaactgctaaccacgccatgacccatatacgccaaattccctcgttatgccacgaccagataagaatcaccagtgggtattcaataagaactgtttccctcttgtggatgtagtgattgatccttaccttgtataacatcttcgaccacatcagaaagaaggaatcatattcctttatgaatgtgtaatgggaatgagaatgaatggcagatgtggagctattcttgctgatgaaatgggtttagggaagacattgcaatgtatttcgctcatctggaccctgcagtgtcagggaccctatggaggcaagccagtaataaagaagacactaattgtcacacctggaagcttggtgaataattggaagaaagaatttcaaaaatggctaggaagtgaaaggatcaagatatttactgttgatcaggaccacaaagttgaagaattcatcaagtctatattttattctgttcttattatcagttatgaaatgttacttcgttccctggatcaaattaagaatataaaatttgatcttctaatctgtgacgaggggcatcgtttgaagaacagtgccattaagacaactacagccctcattagcctttcttgtgagaaaagaataattctaactggtactccaattcagaatgatctgcaagaattttttgcattaattgattttgtaaatccaggaatattaggctctttgtcatcttataggaaaatatatgaagaacccatcattttatcgagagaaccttctgcttctgaggaagaaaaggagttaggagaaagaagagcagctgaacttacttgcctcactggactctttatccttagaagaacccaagaaattataaataaatatctcccacctaaaatagagaatgttgtcttttgccgaccaggagcactacagattgagctttatcgaaagctgttaaattctcaggttgtcaggttctgccttcaagggttgttggaaaatagtccccatctaatatgtataggagctcttaaaaaactgtgcaatcacccctgccttttgttcaactctataaaggaaaaggaatgtagctcaacttgtgataaaaatgaagaaaagagtctatacaaaggcttgctaagtgtgtttcctgctgactacaaccctctcctgtttactgaaaaggagtcaggaaaactacaggtgttgtccaagctcttagcggttatccacgaacttcgacctactgaaaaggtggtgttggtatccaactatacacaaaccttgaacattttacaagaagtatgtaagcgtcatggatatgcttatacaagacttgatggacaaacaccaatctctcaaaggcagcagattgttgatggctttaacagtcaacactcttctttttttatttttttgttaagttcaaaagctggtggtgtaggacttaacctcattggaggatctcacttaattctctatgacattgattggaatccagccactgacattcaggcaatgtctagagtatggagagatggtcagaaatatcctgtacatatttacagactcctaactacaggtacaatagaagaaaagatctatcaaaggcagatcagtaagcaaggtctttgtggggcagttgtcgacctcaccaagacatctgaacatattcagttttcagtagaagaacttaaaaatttgttcacattacatgaaagttcagattgtgttactcatgatctgcttgactgtgagtgtacaggagaagaagttcatacaggtgattcgttggaaaaattcattgtctctagagattgtcagcttggtccacatcaccagaaatctaactccctgaaacctctttctatgtcccagctgaagcaatggaaacatttttctggagatcatttaaatcttacagatccttttcttgaaagaataacagaaaatgtgtcattcatttttcagaatataaccactcaagctactggcacatagtgaaagattacttctgacattccattgctcttcttttgaaaattagtatggtaattaaatgtactttttgaaaattaatagaattatttaaattacagtatatgttgcaaaatatatcacttttgatacaatagtcaaaattgagtggtttaatgttttgtaaatattaagtgtttaaatgaaaaataaagatgtgcttatatcattgt

SEQ ID NO: 63 - DNA, 4465 bp, Homo sapiens
  misc_feature: Incyte ID No: 331657.1
cttggggggagatccgaaatgtgggcacagggctgtgtgcagacacaaagcacggggcctgggctccccactaaggctagagggctgcgtccgaggccgtggggaggctgcctggaacaacatgcaggtattcaccttcacctggagagaggacatccggcctggagacccccagcacaccaagaagttctgctttgatgccatttcccacaccagccctgtcacgctgtacgactgccacagcatgaagggggacaaccaggctgtggaaataccgcaaagacaagaccctgtaccaccctgtcagtggcagctgcatggactgcagtgaaagtgaccataggatcttcatgaacacctgcaacccatcctctctcacccagcagtggctgtttgaacacaccaactcaacagtcttggaaaaattcaataggaactgagccctcatgtccccttggcaggccccccagggtctggcactcactgcagacttcctctttcaagggaggcagggcccctgtgggcactaggtgtaaaaggtgctggccaaatggttcagggtgaagagggctcttgattcaggggctggggtctgcctggtccttgagcccctgagttgtgggggtagggtgaagagcatatcccacaagaggccccacagggagcagagactgctttaatccctgctgacatcacggaaaagcaacagagccttttcaactttgtcactatgtccccttgaacattatgtgggagaacaccaaggtagcctaggccacccaaaagtgagtcctgcgaggttgcccagccctcagatggctctcctacatgatggtgctttagaaacaaaggtaaaatttgcctgtttggggcagcttttagtatcgatgccactcatctgcagcagaagagaaagaagtcctcttggggctttttagtttctgccgtcctggggggaacattgcagttactgcacagcttctgttctctgtcacaaccccaggtgatttggtccggtcaaaggccatacttggggccctaagagtgttcagtattgaatgctgatcagctgccaggtgaggagtcagaagagggagcccccctagacatttctttgcagctatggacatgcgggatatctccccctgctctctgggtatttgaaatgtcaattttagcactctccaggcacaaggacagcccagcaccagctttacagggcagtgtttcagatggccctgagcccacggaaaaggccaggtagacctccaaactagaaatgctggctgatttgccctgatccatgcttccatttccctgtctctcttccccaggcaattactggcctcaaaagaggaacagaggtgctgcgaggtgctcacctcacagagtctggaggcctccaggatcaactgtgggcaaagtgcctgcctctgacctcatcatggttctagttctcatacagaactccagaatttttaaagaactctataattggattgcaaactaggatgctacataggattctggtattccacatccaatatggatttctagaatgctgtgattaaaggagccagccaggtgtaatacagtcaaggcagcccccagcctagagacaatctgtgaaatccaaagttggtggtgttgggaaagcagggggacatgtgtccctcagctcagcagaggctgtggtacaacatggtccttggtgaagacctgcacccctggaacctcccaccatcatcacaactgtagtctcatttgcagtggagaaaagaacccgacgtcccacagccagatatacacccagctccatgccagcccttcatgtttaccttttgctttgttaattacatgtcagactcctagagggcctccagactaataggaagcatttctgtaaccaacctgccacccactgattcagaaatggaaatcacattccacaatctatggcttccaccagctagcccaggaaatacttgaaatcagcattccaattagtgttgagtctcttgattgtgtcatttaccaattaaataactgagacctaagtctgggaacagagccacgaatctgcctttgagatgctggcagatctcaaggccatcaattattgggggagggagggacaaacactcccaatcatccaccagtcagactgaatgtgtagctggcgaggaattacttccacttctggcccagcacaagccctgctttggccacctgtctgcaagagaggcggcccctgtgcttgcaacgcttacgtgttgatcccagtgtccttttccaaatgagtgctgtagctttagaagtggccctctatagaaagaagtcaaaagatgaggccccttctagaatctaggataacaagagtgttgacagtttgaggagtcgaattgagattcatcatcaaagagcaatgcagcgtcgttaaaataaaaactgtgccttttaaaaagaaaaatgcaaatatagagcaaatccctaaacttgaaccatttcctagtgccttgctagacaaacataaaggggcagggttgtggggaggggaacgtttttggtggtgtgtgcagttcctactggatgagtgtgtgtttcttaatgtctcatttcaagcaggagatgttgggtctggagcaagatctgagactgagatgtcccccaagggtgacaggtcagatttatttcagtcagtgcaagtcacactccaaactaaaggctgggcagtgcgtttagtctgtggcctagaagacctcatcagcccccgagaggaggccttgcattacctcactgggacctgtttgggggccatccctgcggtccaccctctgaacccccagcatgtttgtcctgtttctcaccattgggttaaggggtgccgagcactagctagacttccacatagtcccaccccaagtgggcggcagtgttcctggcatgaccaggattcctgtgaaagcaggagcagcagcaagccgtcccgggcctgcctttcccatcctttggttctcctttccagtctgggttcacaccctgaaaagggatgggtgtgtcctctgagcactccggcatttgtcattgctgagcccatatcagtaggtcctgggacttgacaaagtatgtgggaggggaaggaaggacagaacttgactggctccatttcatggaccaactgatcaattgccagtactaagccactcattgttatggcttcctttttgaaaaccacctgtctcaaggattcaggtttctgctcacatccccagctgatgctcaataaaactcagccaggagcatatggagatgctgacagccaggtaatgggtgagactgtggggtcccttttcctctaaagcctttactctgaggataaggtcacaaagtagggtgtgacttgaaagtatcgtgaccatgtggcccaccagcagcctttccaaaggggaactccagagacatttcataatgcaaacagcactgttgctttaagaacaaggcctttggaggtggctaaacttgcacgcacgtgtgtgaaaagccatcccatcttctgcctccagttggagctttcagctgttaaaacagtcagaaactattgattcttccctttaggaaaaaatgctcaggcagaacggggtacatccacaggaggaatcggacgagaggatgtgacattcggtccaggagagaaagagcagtttctgttaaagatgtaacaaatggatttccaaagtctacatgacattcacttttcaaacttcccaccagttgaatttctttttttccttaagaaacaggtgatgtcttggaaaacagctccttatgtctctctgtgcatctccattttcctagtctctggagtctcaaaaagagtggcaaagcactttacagtagtaactgaggaatcagagtctctgcttcagcgatatctagtttgtacagttgggtgatcttttgtaattcctaggaggtaatgcatttttaatgttttctgaagctttgtaagtgtgagagagggacaagaagtgcagttctgttctggaattccttattgctttcaacggacactctttgtgaaaaatccaagtaatattttagttcaaacttgatcttgagccaaggcccactgccacctctgggatgggagtcggacctacataccaagtgacaagttcaccttaacatctgcttccagaatggctttgattcagccgtgccaggcaacagaacagggtcagactcctgctctgttattggcttgaagactaggatcccaaaggggttggaggcagggaatatttgaaaattcagactggaattccaggccaaaagctcaagaccaccagcctctcctcctgcctggaaaaataagcctttgtgaaagactgatttaccatgtacaattgtgattgtgaacgttgttgagtaaacctccagactttctctaaagtggtctctgccc

SEQ ID NO: 64 - DNA, 172 bp, Homo sapiens
  misc_feature: Incyte ID No: 1395562.1
  unsure 141: a, t, c, g, or other
ctgctcttcccctccctgccgccttctgggaggtagcagtccctggcctctccccctggctgatcactctccctcaggcagtggagatctgcgtctggacaccctcagatcctgtcattgcctgcccagagtccttcaggngcacccctctgccttggtgtgcagtccaggg

SEQ ID NO: 65 - DNA, 1851 bp, Homo sapiens
  misc_feature: Incyte ID No: 1097124.19
gagcgaaaaaccagcaccgcccaacgaacgaccaaaccgctctgcgcgcggtcctcggagacacgcggcggtgtcctgtgttggccatggccgactacctgattagtgggggcacgtcctacctgccagaacgacggactcacagcacagcagctcttcaactgcggagacggcctcacctacaatgactttctcattctccctgggtacatcgacttcactgcagaccaggtggacctgacttctgctctgaccaagaaaatcactcttaagaccccactggtttcctctcccatggacacagtcacagaggctgggatggccatagcaatggcggtgagccccatggggtgtgggggaaggagcaaggactccatcgcctttccccaaaggcattcagtcctgcttcttgtcacttagtagtagtctctttttatcctgtagcttacaggcggtattggcttcatccaccacaactgtacacctgaattccaggccaatgaagttcggaaagtgaaggtcagaagggcaacgatcattagcaagcgctcctgggaattgcactgaggtggggtggaggtgggagtaaggggtttattctaatttagtattctttcttcccaccatggggttcagtttactgagaagagcctgagattctgtttcttaaagcagcagcaatagaccaggtgttcagttgcttccagtctaaccatgtctctaacgatgtgttgggtgtgatctggcttggtggcactgccaaagggatcgataagcagagaccccatgcttcagatcaagagcctgatgaaagtagttcaaagatgcgatgccctttctcaccatccctttccagaaatatgaacagggattcatcacagaccctgtggtcctcagccccaaggatcgcgtgcgggatgtttttgaggccaaggcccggcatggtttctgcggtatcccaatcacagacacaggccggatggggagccgcttggtgggcatcatctcctccagggacattgattttctcaaagaggaggaacatgactgtttcttggaagagataatgacaaagagggaagacttggtggtagcccctgcaggcatcacactgaaggaggcaaatgaaattctgcagcgcagcaagaagggtaagtcctagagctgggaaagggcctggaactaatgcctagggtcctgattcatgtcctgccctgaccacaggaaagttgcccattgtaaatgaagatgatgagcttgtggccatcattgcccggacagacctgaagaagaatcgggactacccactagcctccaaagaatgcccaagaaacagctgctgtgtggggcagccattggcactcatgaggatgacaagtataggctggacttgctcgcccaggctggtgtggatgtagtggttttggactcttcccagggaaattccatcttccagatcaatatgatcaagtacatcaaagacaaataccctaatctccaagtcattggaggcaatgtggtcactgctgcccaggccaagaacctcattgatgcaggtgtggatgccctgcgggtgggcatgggaagtggctccatctgcattacgcaggaagtggctcccaagatccctccagacataaagtcccacagccccaaatgcccttctactgtcacgggttgctatatgctggcctgtgggcggccccaagcaacagcagtgtacaaggtgtcagagtatgcacggcgctttggtgttccggtcattgctgatggaggaatccaaaatgtgggtcatattgcgaaagccttggcccttggggcctccacagtcatgatgggctctctcctggc

SEQ ID NO: 66 - DNA, 1642 bp, Homo sapiens
  misc_feature: Incyte ID No: 331106.1
  unsure 1637: a, t, c, g, or other
gctcgagtggttgctttatttggtgaaagtagaatccaaaggattggaaaaggtaacttgtgagccacaaaaggagataaactccctgaacctaacggagtctcacaactcaagaaagaaacgggaaattactgaaaaacagatagatgataacagaaaattttctttatttgctgaaagaaaataccagactcttaactgtagcgtgaacgtgaactgtgtgaacatcagatgcccgctgcgggggctggacagcaaggcgtctcttattttgcgctcgaggttatggaacagcacatttctagaggaatattccaaactgaactacttggacattctcatgcgagccttcattgatgtgactgctgctgccgaaaatatcaggctgccaaatgcaggcactcaggttcgagtgactgtgtttccctcaaagactgtagctcagtattcgggagtaccttggtggatcatcctagtggctattctcgctgggatcttgatgcttgctttattagtgtttatactatggaagtgtggattctttaaacgctctaggtacgatgacagtgttccccgataccatgctgtaaggatccggaaagaagagcgagagatcaaagatgaaaagtatattgataaccttgaaaaaaaacagtggatcacaaagtggaacgaaaatgaaagctactcatagcgggggcctaaaaaaaaaaagcttcacagtacccaaactgctttttccaactcagaaattcaatttggatttaaaagcctgctcaatccctgaggactgatttcagagtgactacacacagtacgaacctacagttttaactgtggatattgttacgtagcctaaggctcctgttttgcacagccaaatttaaaactgttggaatggatttttctttaactgccgtaatttaactttctgggttgcctttgtttttggcgtggctgacttacatcatgtgttggggaagggcctgcccagttgcactcaggtgacatcctccagatagtgtagctgaggaggcacctacactcacctgcactaacagagtggccgtcctaacctcgggcctgctgcgcagacgtccatcacgttagctgtcccacatcacaagactatgccattggggtagttgtgtttcaacggaaagtgctgtcttaaactaaatgtgcaatagaaggtgatgttgccatcctaccgtcttttcctgtttcctagctgtgtgaatacctgctcacgtcaaatgcatacaagtttcattctccctttcactaaaacacacaggtgcaacagacttgaatgctagttatacttatttgtatatggtatttattttttcttttctttacaaaccattttgttattgactaacaggccaaagagtctccagtttacccttcagggttggtttaatcaatcagaattagagcatgggaggtcatcactttgacctaaattatttactgcaaaaagaaaatctttataaatgtaccagagagagttgttttaataacttatctataaactataacctctccttcatgacagcctccaccccacaacccaaaaggtttaagaaatagaattataactgtaaagatgttattcaggcatggatattttntactt

SEQ ID NO: 67 - DNA, 5760 bp, Homo sapiens
  misc_feature: Incyte ID No: 331106.6
gcgcgaccgtcccgggggtggggccgggcgcagcggcgagaggaggcgaaggtggctgcggtagcagcagcgcggcagcctcgtgacccagcccggagcgcagggcggccgctgcaggtccccgctcccctccccgtgcgtccgcccatggccgccgccgggcagctgtgcttgctctacctgtcggcggggctcctgtcccggctcggcgcagccttcaacttggacactcgggaggacaacgtgatccggaaatatggagaccccgggagcctcttcggcttctcgctggccatgcactggcaactgcagcccgaggacaagcggctgttgctcgtgggggccccgcgggcagaagcgcttccactgcagagagccaacagaacgggagggctgtacagctgcgacatcaccgcccgggggccatgcacgcggatcgagtttgataacgatgctgaccccacgtcagaaagcaaggaagatcagtggatgggggtcaccgtccagagccaaggtccagggggcaaggtcgtgacatgtgctcaccgatatgaaaaaaggcagcatgttaatacgaagcaggaatcccgagacatctttgggcggtgttatgtcctgagtcagaatctcaggattgaagacgatatggatgggggagattggagcttttgtgatgggcgattgagaggccatgagaaatttggctcttgccagcaaggtgtagcagctacttttactaaagactttcattacattgtatttggagccccgggtacttataactggaaagggattgttcgtgtagagcaaaagaataacactttttttgacatgaacatctttgaagatgggccttatgaagttggtggagagactgagcatgatgaaagtctcgttcctgttcctgctaacagttacttaggtttttctttggactcagggaaaggtattgtttctaaagatgagatcacttttgtatctggtgctcccagagccaatcacagtggagccgtggttttgctgaagagagacatgaagtctgcacatctcctccctgagcacatattcgatggagaaggtctggcctcttcatttggctatgatgtggcggtggtggacctcaacaaggatgggtggcaagatatagttattggagccccacagtattttgatagagatggagaagttggaggtgcagtgtatgtctacatgaaccagcaaggcagatggaataatgtgaagccaattcgtcttaatggaaccaaagattctatgtttggcattgcagtaaaaaatattggagatattaatcaagatggctacccagatattgcagttggagctccgtatgatgacttgggaaaggtttttatctatcatggatctgcaaatggaataaataccaaaccaacacaggttctcaagggtatatcaccttattttggatattcaattgctggaaacatggaccttgatcgaaattcctaccctgatgttgctgttggttccctctcagattcagtaactattttcagatcccggcctgtgattaatattcagaaaaccatcacagtaactcctaacagaattgacctccgccagaaaacagcgtgtggggcgcctagtgggatatgcctccaggttaaatcctgttttgaatatactgctaaccccgctggttataatccttcaatatcaattgtgggcacacttgaagctgaaaaagaaagaagaaaatctgggctatcctcaagagttcagtttcgaaaccaaggttctgagcccaaatatactcaagaactaactctgaagaggcagaaacagaaagtgtgcatggaggaaaccctgtggctacaggataatatcagagataaactgcgtcccattcccataactgcctcagtggagatccaagagccaagctctcgtaggcgagtgaattcacttccagaagttcttccaattctgaattcagatgaacccaagacagctcatattgatgttcacttcttaaaagagggatgtggagacgacaatgtatgtaacagcaaccttaaactagaatataaattttgcacccgagaaggaaatcaagacaaattttcttatttaccaattcaaaaaggtgtaccagaactagttctaaaagatcagaaggatattgctttagaaataacagtgacaaacagcccttccaacccaaggaatcccacaaaagatggcgatgacgcccatgaggctaaactgattgcaacgtttccagacactttaacctattctgcatatagagaactgagggctttccctgagaaacagttgagttgtgttgccaaccagaatggctcgcaagctgactgtgagctcggaaatccttttaaaagaaattcaaatgtcactttttatttggttttaagtacaactgaagtcacctttgacaccccagatctggatattaatctgaagttagaaacaacaagcaatcaagataatttggctccaattacagctaaagcaaaagtggttattgaactgcttttatcggtctcgggagttgctaaaccttcccaggtgtattttggaggtacagttgttggcgagcaagctatgaaatctgaagatgaagtgggaagtttaatagagtatgaattcagggtaataaacttaggtaaacctcttacaaacctcggcacagcaaccttgaacattcagtggccaaaagaaattagcaatgggaaatggttgctttatttggtgaaagtagaatccaaaggattggaaaaggtaacttgtgagccacaaaaggagataaactccctgaacctaacggagtctcacaactcaagaaagaaacgggaaattactgaaaaacagatagatgataacagaaaattttctttatttgctgaaagaaaataccagactcttaactgtagcgtgaacgtgaactgtgtgaacatcagatgcccgctgcgggggctggacagcaaggcgtctcttattttgcgctcgaggttatggaacagcacatttctagaggaatattccaaactgaactacttggacattctcatgcgagccttcattgatgtgactgctgctgccgaaaatatcaggctgccaaatgcaggcactcaggttcgagtgactgtgtttccctcaaagactgtagctcagtattcgggagtaccttggtggatcatcctagtggctattctcgctgggatcttgatgcttgctttattagtgtttatactatggaagtgtggtttcttcaagagaaataagaaagatcattatgatgccacatatcacaaggctgagatccatgctcagccatctgataaagagaggcttacttctgatgcatagtattgatctacttctgtaattgtgtggattctttaaacgctctaggtacgatgacagtgttccccgataccatgctgtaaggatccggaaagaagagcgagagatcaaagatgaaaagtatattgataaccttgaaaaaaaacagtggatcacaaagtggaacagaaatgaaagctactcatagcgggggcctaaaaaaaaaaaaagcttcacagtacccaaactgctttttccaactcagaaattcaatttggatttaaaagcctgctcaatccctgaggactgatttcagagtgactacacacagtacgaacctacagttttaactgtggatattgttacgtagcctaaggctcctgttttgcacagccaaatttaaaactgttggaatggatttttctttaactgccgtaatttaactttctgggttgcctttgtttttggcgtggctgacttacatcatgtgttggggaagggcctgcccagttgcactcaggtgacatcctccagatagtgtagctgaggaggcacctacactcacctgcactaacagagtggccgtcctaacctcgggcctgctgcgcagacgtccatcacgttagctgtcccacatcacaagactatgccattggggtagttgtgtttcaacggaaagtgctgtcttaaactaaatgtgcaatagaaggtgatgttgccatcctaccgtcttttcctgtttcctagctgtgtgaatacctgctcacgtcaaatgcatacaagtttcattctccctttcactaaaaacacacaggtgcaacagacttgaatgctagttatacttatttgtatatggtatttattttttcttttctttacaaaccattttgttattgactaacaggccaaagagtctccagtttacccttcaggttggtttaatcaatcagaattagaattagagcatgggaggtcatcactttgacctaaattatttactgcaaaaagaaaatctttataaatgtaccagagagagttgttttaataacttatctataaactataacctctccttcatgacagcctccaccccacaacccaaaaggtttaagaaatagaattataactgtaaagatgtttatttcaggcattggatattttttactttagaagcctgcataatgtttctggatttcatactgtaacattcaggaattcttggagaaaatgggtttattcactgaactctagtgcggtttactcactgctgcaaatactgtatattcaggacttgaaagaaatggtgaatgcctatggtggatccaaactgatccagtataagactactgaatctgctaccaaaacagttaatcagtgagtcgatgttctattttttgttttgtttcctcccctatctgtattcccaaaaattactttggggctaatttaacaagaactttaaattgtgttttaattgtaaaaatggcagggggtggaattattactctatacattcaacagagactgaatagatatgaaagctgattttttttaattaccatgcttcacaatgttaagttatatggggagcaacagcaaacaggtgctaatttgttttggatatagtataagcagtgtctgtgttttgaaagaatagaacacagtttgtagtgccactgttgttttgggggggcttttttcttttcggaaatcttaaaccttaagatactaaggacgttgttttggttgtactttggaattcttagtcacaaaatatattttgtttacaaaaatttctgtaaaacaggttataacagtgtttaaagtctcagtttcttgcttggggaacttgtgtccctaatgtgtttagattgctagattgctaaggagctgatactttgacagtgtttttagacctgtgttactaaaaaaaagatgaatgtcctgaaaagggtgttgggagggtggttcaacaaagaaacaaagatgttatggtgtttagatttatggttgttaaaaatgtcatctcaagtcaagtcactggtctgtttgcatttgatacatttttgtactaactagcattgtaaaattatttcatgattagaaattacctgtggatatttgtataaaagtgtgaaataaattttttataaaagtgttcattgtttcgtaacacagcattgtatatgtgaagcaaactctaaaattataaatgacaacctgaattatctatttcatcaaaccaaagttcagtgtttttatttttggtgtctcatgtaatctcagatcagccaaagatactagtgccaaagcaatgggattcggggtttttttctgttttcgctctatgtaggtgatcctcaagtctttcattttccttctttatgattaaaagaaacctacaggtatttaaca

SEQ ID NO: 68 - DNA, 4844 bp, Homo sapiens
  misc_feature: Incyte ID No: 238853.22
  unsure 1592-2012, 2067-2086, 2171-2479: a, t, c, g, or other
aggtcggtcctggccaggtcagctcatccagcaccctgcgcaggccgttgatgtcggcctccacgctcatgcgcagagcctgttccgtctcaaacttggttcggaagtcatctgcagccagacgggcgttgtcgatctgcaggacaatcctggagttctcaatggtggcaccaagaatcttgtcccgcaggtcctggatggtcgtgtagtagtggctgtagccgcgggagggcccaggccccagcttctgagaccagggttgctccgtccgtgctccgcctcgccatgacttcctacagctatcgccagtcgtcggccagcattcacgggggctccggcggccgcggcgtatccgtgtcctccgcccgctttgtgtcctcgtcctcctcggggggctacggcggcggctacggcggcgtcctgaccgcgtccgacgggctgctggcgggcaacgagaagctaaccatgcagaacctcaacgaccgcctggcctcctacctggacaaggtgcgcgccctggaggcggccaacggcgagctagaggtgaagatccgcgactggtaccagaagcaggggcctgggccctcccgcgactacagccactactacacgaccatccaggacctgcgggacaaggtgggcggaggcccggccgcgggaagtgcagtgcacctgccgcggaaacccagccccgcgggccgggcgaggttccaggcggggcggcgggcaggagcccgttaggacgtgggaaggtccacaggtggggccgagtaaagggggacaggagacgtgcggggcaggacctcggggctggatgcagaggccggggtggtggaaaggggaggagaactgggcagggcagataagtgggtggggcctctggaggtggcgggggcaaggttggagccccgggacgaagaagggacgcgggtcagcgaggcctgaagagtgggaggagatgggacccggctgtagagtgcccagaggtctaggccaggggccgcgctgccgcaggaagatgcgagagtttggctttggtgatctggtccacccggggccagtcttgccccctctgccaccgcagcgtagggcctcctgcattccgtttctctggccggaagggtctagtgttcatccctctcaggctttggcctcctcccactctcccgccctggggcccattcgtttaggaagaatgggagagccggtcgtggcccctgggcggggtaaaggagggaggcttggtaaacctctgctggggaggacccagtacagtggcagctccttgtcggggaaagaacggatctgcgtcacacgctcttacaggggaaccctaaggggcctgaggggtagggcttggtctccacccagagggaaggagaaatttttcgagtcgtaaagaaatgtatcagaagccatggaacatttacagccgcacacgctgggtctcccaacaaacagatccccaaaatattttccagtgctgtactcgtggcatagacccagacccacagaccaggaggaagcgctagagatgtcaacagccaacaaaaacagtgctttacacacttgtaaaattgtgacctacaggnnnnnnnnnnnnnnnnnnnnnnnnnnnnnnnnnnnnnnnnnnnnnnnnnnnnnnnnnnnnnnnnnnnnnnnnnnnnnnnnnnnnnnnnnnnnnnnnnnnnnnnnnnnnnnnnnnnnnnnnnnnnnnnnnnnnnnnnnnnnnnnnnnnnnnnnnnnnnnnnnnnnnnnnnnnnnnnnnnnnnnnnnnnnnnnnnnnnnnnnnnnnnnnnnnnnnnnnnnnnnnnnnnnnnnnnnnnnnnnnnnnnnnnnnnnnnnnnnnnnnnnnnnnnnnnnnnnnnnnnnnnnnnnnnnnnnnnnnnnnnnnnnnnnnnnnnnnnnnnnnnnnnnnnnnnnnnnnnnnnnnnnnnnnnnnnnnnnnnnnnnnnnnnnnnnnnnnnnnnnnnnnnnnnnnnnnnnnnnnnnnnnnnnnnnnnnnnnnnnnnattgcgacaataagtacattttactacgcacccttacgcattctttttctcaccnnnnnnnnnnnnnnnnnnnncacatgcacacacacaaatgggtgaaacaattctcaccatactaagagaaatcccctctgatattttgtagcctattctgttgcnnnnnnnnnnnnnnnnnnnnnnnnnnnnnnnnnnnnnnnnnnnnnnnnnnnnnnnnnnnnnnnnnnnnnnnnnnnnnnnnnnnnnnnnnnnnnnnnnnnnnnnnnnnnnnnnnnnnnnnnnnnnnnnnnnnnnnnnnnnnnnnnnnnnnnnnnnnnnnnnnnnnnnnnnnnnnnnnnnnnnnnnnnnnnnnnnnnnnnnnnnnnnnnnnnnnnnnnnnnnnnnnnnnnnnnnnnnnnnnnnnnnnnnnnnnnnnnnnnnnnnnnnnnnnnnnnnnnnnnnnnnnnnnnnnnnnnnnnnnnnnnnnnnnnccccaaaaaacaaaaccaaaaaacccccccaaaacacaaaactatacaatcaccacctggtgccttgactaatgagtgatgacctgctctttgaaaaacagaacacaattaccttattcaatgataagctggctgttgtgaatgcgcctcttaggtcagtaagacctcaggttggggtgaacttggatgaggcatcatcctacactttagtttccacctctgtaagataggagtacccactgacctagcagtgaggttccagaagctataaaagatgagattcaaagtgcctggcacataattgatactcaacaaatgggattctcttccctgggggcaaaatatgcttcgcatagtggggggggcaggtatagacaaaatctaccccccatctggtttatagacccccttcaggccatttagagtttcattgcacacaggtctcagagatttcctccccaggcttgccttcctgccctcccccacccaagtccccctggctccagttttcttcctgccccagcttctgggcatggactgtttgcaaggcctcccagagagcgggccaatgggcggcagatgctggctagggctttggtctctagggtgccggggtatattcatttgctcccctctctcttctgggaagaaagtgagtgggcagtgcctgtgtgttgaactggtaccaacctctgcctctgccttccagattcttggtgccaccattgagaactccaggattgtcctgcagatcgacaacgcccgtctggctgcagatgacttccgaaccaagtgagtgtctctgtcctgggggctgcagaagccaggactggggtaggggttggggggtttagaatctgccctcacctagcctagatggcctgaagctaacccccctatggactcctgaactctggggaggtagggaagtcttcagagatgctgaggaagctctgcctggctgcaactatttcctttgaaaggtttgagacggaacaggctctgcgcatgagcgtggaggccgacatcaacggcctgcgcagggtgctggatgagctgaccctggccaggaccgacctggagatgcagatcgaaggcctgaaggaagagctggcctacctgaagaagaaccatgaggaggtgggtttgaagctgggcctttcttccatccttccctaacctcccagggctgaagactcttttattctgtattctctgaccgtggtaacacttggtgcaccctcaccatggccctgggtgtgggatcatggatcccagggttccaagaggaatcagtgacgacccagtctgtcccccagtgctagttactaggcctgcacctgaaaactaagcccctttagcctgaagggtggggaagtgacctgggccaggcccagtggggtctgggccctgacatgcccatctctgctgtatcttttcaggaaatcagtacgctgaggggccaagtgggaggccaggtcagtgtggaggtggattccgctccgggcaccgatctcgccaagatcctgagtgacatgcgaagccaatatgaggtcatggccgagcagaaccggaaggatgctgaagcctggttcaccagccgggtaggtagagggaagcaggcaccctttgggggttaggaaggggagggcttggtgttccctacgcgaaggtctgactcaatgcttattccctcttcttcctctctctgcagactgaagaattgaaccgggaggtcgctggccacacggagcagctccagatgagcaggtccgaggttactgacctgcggcgcacccttcagggtcttgagattgagctgcagtcacagctgagcatggtatgtgtccccccaccgccgccgcttccctgtgcaattcacacttatacccttgcagcctagggcagcctggccggtggctgtgcccatgccctctccgggaaccaggctctgctgagtcacaaccccctctccctatcctcagaaagctgccttggaagacacactggcagaaacggaggcgcgctttggagcccagctggcgcatatccaggcgctgatcagcggtattgaagcccagctgggcgatgtgcgagctgatagtgagcggcagaatcaggagtaccagcggctcatggacatcaagtcgcggctggagcaggagattgccacctaccgcagcctgctcgagggacaggaagatcactacaacaatttgtctgcctccaaggtcctctgaggcagcaggctctggggcttctgctgtcctttggagggtgtcttctgggtagagggatgggaaggaagggacccttacccccggctcttctcctgacctgccaataaaaatttatggtccaaggg

SEQ ID NO: 69 - DNA, 2338 bp, Homo sapiens
  misc_feature: Incyte ID No: 008513.6
ggagtccgattcctcgtcctgcttctcctccctctcgcctccagcctctcacactctcctaagccctctcatctcctggaaccatggccagcacatccaccaccatcaggagccacagcagcagccgccggggtttcagtgccaactcagccaggctccctggggtcagccgctctggcttcagcagcatctccgtgtcccgctccaggggcagtggtggcctgggtggcgcatgtggaggagctggctttggcagccgcagtctgtatggcctggggggctccaagaggatctccattggagggggcagctgtgccatcagtggcggctatggcagcagagccggaggcagctatggctttggtggcgccgggagtggatttggtttcggtggtggagccggcattggctttggtctgggtggtggagccggccttgctggtggctttgggggccctggcttccctgtgtgcccccctggaggcatccaagaggtcactgtcaaccagagtctcctgactcccctcaacctgcaaattgaccccgccatccagcgggtgcgggccgaggagcgtgagcagatcaagaccctcaacaacaagtttgcctccttcatcgacaaggtgcggttcctagagcagcagaacaaggttctggacaccaagtggaccctgctgcaggagcagggcaccaagactgtgaggcagaacctggagccgttgttcgagcagtacatcaacaacctcaggaggcagctggacaacatcgtgggggaacggggtcgtctggactcggagctgagaaacatgcaggacctggtggaggacctcaagaacaaatatgaggatgaaatcaacaagcgcacagcagcagagaatgaatttgtgactctgaagaaggatgtggatgctgcctacatgaacaaggttgaactgcaagccaaggcagacactcttacagatgagatcaacttcctgagagccttgtatgatgcagagctgtcccagatgcagacccacatctcagacacatccgtggtgctatccatggacaacaaccgcaacctggacctggacagcatcatcgctgaggtcaaggcccaatatgaggagattgctcagaggagcagggctgaggctgagtcctggtaccagacaaagtacgaggagctgcagatcacagcaggcagacatggggacgacctgcgcaacaccaagcaggagattgctgagatcaaccgcatgatccagaggctgagatctgagatcgaccacgtcaagaagcagtgtgccaacctacaggccgccattgctgatgctgagcagcgtggggagatggccctcaaggatgctaagaacaagctggaagggctggaggatgccctgcagaaggccaagcaggacctggcccggctgctgaaggagtaccaggagctgatgaacgtcaagctggccctggatgtggagatcgccacctaccgcaagctgctggagggcgaggagtgcaggctgaatggcgaaggcgttggacaagtcaacatctctgtagtgcagtccaccgtctccagtggctatggcggtgccagcggtgtcggcagtggcttaggcctgggtggaggaagcagctactcctatggcagtggtcttggcgttggaggcggctttagttccagcagcggcagagccactgggggtggcctcagctctgttggaggcggcagttccaccatcaagtacaccaccacctcctcctccagcaggaagagctacaagcactgaagtgctgccgccagctctcagtcccacagctctcaggcccctctctggcagcagagccctctcctcaggttgcttgtcctcccctggcctccagtctcccctgccctcccgggtagagctgggatgccctcacttttcttctcatcaatacctgttccactgagctcctgttgcttaccatcaagtcaacagttatcagcactcagacatgcgaatgtcctttttagttcccgtattattacaggtatctgagtctgccataattctgagaagaaaatgacctatatccccataagaactgaaactcagtctaggtccagctgcagatgaggagtcctctctttaattgctaaccatcctgcccattatagctacactcaggagttctcatctgacaagtcagttgtcctgatcttctcttgcagtgtccctgaatggcaagtgatgtaccttctgatgcagtctgcattcctgcactgctttctctgctctctttgccttcttttgttctgttgaataaagcatattgagaatgtgaaaaaaaaaaaaaaagtcgacgc

SEQ ID NO: 70 - DNA, 1365 bp, Homo sapiens
  misc_feature: Incyte ID No: 203434.3
ggaatgagtaaaagtgaggcctgtccgtaggagtttaagcttgagaaagtgcagctggaaggggctcagacaccatcttcacctggggtgttatctgaggcccacctgcatcatagttaccatgctgcaaattaaaaacatagcttggagattttccatctctgggagcggggctgggaatctgaatgactttgtgttctgctactgactgacgaaaagttgagctcccagagttgaagtgatttgttccaggtcacacggttagtaggtggagctagtggtgttgaaaccatctaggtctttaggaactggtcaagtgctaggttggggcttcagttgctctgggataccagtgctgatgcccaccatgcagtctggagggtcagcagggcaagcttcatgctgtgaccatgtacagcagctgtagaaactgtttctgggtagggcagtagtatttggcctgtgggttggacagggcaggcctgcttccacccctactaaatgttccctgtactgaggacatggtctccctctgccccatcttgccccaacccccaggatgtggatgctgcctacatgagcaaggtggagctggaggccaaggtggatgccctgaatgatgagatcaacttcctcaggaccctcaatgagacggagttgacagagctgcagtcccagatctccgacacatctgtggtgctgtccatggacaacagtcgctccctggacctggacggcatcatcgctgaggtcaaggcgcagtatgaggagatggccaaatgcagccgggctgaggctgaagcctggtaccagaccaagtttgagaccctccaggcccaggctgggaagcatggggacgacctccggaatacccggaatgagatttcagagatgaaccgggccatccagaggctgcaggctgagatcgacaacatcaagaaccagcgtgccaagttggaggccgccattgccgaggctgaggagcgtggggagctggcgctcaaggatgctcgtgccaagcaggaggagctggaagccgccctgcagcgggccaagcaggatatggcacggcagctgcgtgagtaccaggaactcatgagcgtgaagctggccctggacatcgagatcgccacctaccgcaagctgctggagggcgaggagagccggttggctggagatggagtgggagccgtgaatatctctgtgatgaattccactggtggcagtagcagtggcggtggcattgggctgaccctcgggggaaccatgggcagcaatgccctgagcttctccagcagtgcgggtcctgggctcctgaaggcttattccatccggaccgcatccgccagtcgcaggagtgcccgc

SEQ ID NO: 71 - DNA, 6456 bp, Homo sapiens
  misc_feature: Incyte ID No: 1295543CB1
cccacgcgtccgagctagtggaagttactgccgcgccaccgagtccggaccggagactttggggcctaactagtgaatggtagtgtctagaaagggtatgtcccttcaagagagaggtgccaatgtccaaccggcctaataacaatccaggggggtcactgcgacgttcacagaggaacactgccggggcccaaccacaagacgactcaataggaggaagaagctgcagttcatcatctgctgtgatagttccacaaccagaggatccagacagagccaatacttcagaaagacaaaaaacggggcaggtgcctaagaaagacaattctcgaggagtgaagcgcagtgctagtccagactacaacaggaccaattctcctagctctgcaaaaaaaccaaaagcacttcagcatactgaatctccctcagaaacaaataagccacatagtaagtcaaagaagagacatttagaccaggagcaacaactgaaatctgcacaatcaccatcaacaagcaaggctcataccaggaagagtggggccactggcggttcacggagtcagaaaagaaaaaggacagagagttcttgtgtaaagagtggctccgggtctgaatcaactggtgcagaagagagatctgcgaaacctaccaagctggcttcaaaatcagccacctcagccaaagctgggtgtagcaccatcactgattcttcttctgctgcctctacttcctcctcgtcttctgctgtagcctcggcctcctccactgtaccaccaggtgccagagtgaaacaaggaaaagatcagaacaaggccaggcgttcccgttcagcgtccagtcccagccccagaagaagtagcagggaaaaggaacagagtaaaactggtggctcttcaaaatttgattgggctgctcgtttcagccctaaagttagccttcctaaaacaaaactgtctcttccagggtcttctaagtcagagacatcaaaacctggaccttctggattacaggccaaattagcaagtttaagaaaatctacgaagaaacgcagtgagtctccacctgctgagctccccagtttgaggcggagcacacgccaaaagaccacgggctcctgtgctagtaccagtcggcgaggctctggcctgggcaaaagaggagcagctgaagctcgtcgacaggagaaaatggcagaccctgaaagcaaccaggaggcagtaaattcttcagctgctcggacagatgaagctccccaaggagctgcaggggctgttggcatgaccacctctggggagagtgaatcagatgattccgagatgggacgtttgcaagctttgttagaggcaaggggtcttccccctcacctatttggtcctcttggtcctcggatgtcacagcttttccatagaacaattggaagtggagctagttctaaggcccagcagctactacaaggattgcaagccagtgatgaaagtcaacagcttcaggcagttattgagatgtgtcagttactggtcatgggaaatgaggagacactgggagggtttcctgtcaagagtgttgttccagctttgattacgttacttcagatggagcacaattttgatattatgaaccatgcttgtcgagccttaacatacatgatggaagcacttcctcgatcttctgctgttgtagtagatgctattcctgtctttttagaaaagctgcaagttattcagtgtattgatgtggcagagcaggccttgactgccttggagatgttgtcacggagacatagtaaagccattctacaggcgggtggtttggcagactgcttgctgtacctagaattcttcagcataaatgcccaaagaaatgcattagcaattgcagctaattgctgccagagtatcacgccagatgaatttcattttgtggcagattcactcccattgctaacccaaaggctaacacatcaggataaaaagtcagtagaaagcacttgcctttgttttgcacgcctagtggacaacttccagcatgaggagaatttactccagcaggttgcttccaaagatctgcttacaaatgttcaacagctgttggtagtgactccacccattttaagttctgggatgtttataatggtggttcgcatgttttctctgatgtgttccaactgtccaactttagctgttcaacttatgaaacaaaacattgcagaaacgcttcactttctcctgtgtggtgcctccaatggaagttgtcaggaacagattgatcttgttccacgaagccctcaagagttgtatgaactgacatctctgatttgtgaacttatgccatgtttaccaaaagaaggcatttttgcagttgataccatgttgaagaagggaaatgcacagaacacagatggtgcgatatggcagtggcgtgatgatcggggcctctggcatccatataacaggattgacagccggatcattgagcaaatcaatgaggacacgggaacagcacgtgccattcagagaaaacctaacccgttagccaatagtaacactagtggatattcagagtcaaagaaggatgatgctcgagcacagcttatgaaagaggatccggaactggctaagtcttttattaagacattatttggtgttctttatgaagtgtatagttcctcagcaggacctgcggtcagacataagtgccttagagcaattcttaggataatttattttgcggatgctgaacttctgaaggatgttctgaaaaatcatgctgtttcaagtcacattgcttccatgctgtcaagccaagacctgaagatagtagtgggagcacttcagatggcagaaattttaatgcagaagttacctgatatttttagtgtttacttcagaagagaaggtgtaatgcatcaagtaaaacacttagcagaatcagagtctttgttgacaagtccaccaaaggcatgtacgaatggatcgggatccatgggatccacaacttcagtcagcagtgggacagccacagctgccactcatgctgcagctgacttgggatcacccagcttgcagcacagcagggatgattctttagatctcagccctcaaggtcgattaagtgatgttctaaagagaaaacgactgccaaaacgagggccaagaaggccaaagtactcacctccaagagatgatgacaaagtagacaatcaagctaaaagccccaccactactcagtcacctaaatcttctttcctggcaagcttgaatccaaaaacatggggaaggttaagtacacagtccaacagcaacaacattgagccagcacggactgcgggaggtagtggccttgccagggctgcctcaaaggataccatctccaataatagagaaaaaattaaaggttggattaaggagcaggcacataaatttgtagaacgttatttcagttctgagaatatggatggaagcaaccctgcattgaatgtccttcagagactttgtgctgcaaccgaacaactcaacctccaggtggatggtggagctgagtgccttgtagaaatccgtagcatagtctcagagtcagatgtttcatcatttgaaatccaacatagtggatttgtgaagcagctgttgctttatttgacatctaaaagtgaaaaggatgctgtgagcagagagatcagattaaagcgatttcttcatgtatttttttcttctccacttcctggagaagagcccattggaagagtggaaccagtgggtaatgcacctttgttggcattagttcacaagatgaacaactgcctcagccagatggaacaatttccagtcaaagtacatgatttccctagtggaaatgggacaggaggcagcttttctctcaacagaggatcacaggctttaaaatttttcaacacacatcaattaaaatgccagttacaaaggcatccagactgtgcaaatgtgaagcagtggaagggtggacctgtcaagattgaccctctggctttggtacaagccatcgagagataccttgtagttagagggtatggaagagtaagagaagatgatgaagacagcgatgacgatggatcagatgaggaaatagatgagtctctggctgctcagttcctaaattcaggaaatgtaagacacaggctgcagttttatattggagaacatttgctgccgtataacatgactgtgtatcaggcagtacggcagtttagtatacaggctgaagatgaaagagaatccacagatgatgagagcaatcctctaggcagagctggtatttggacaaagactcatacaatatggtataaacctgtgagagaggatgaagaaagtaataaagattgtgttggtggtaaaagaggaagagcccaaacagctccaacgaaaacttcccctagaaatgcaaaaaagcatgatgagttatggcacgatggagtgtgcccatcagtatcaaatcctttagaagtttacctcattcccacaccacctgaaaatataacatttgaagacccgtcattagatgtgatccttcttttaagagttttacatgctatcagtcgatactggtattacttgtatgataatgcaatgtgcaaggaaattattccaactagtgaatttattaacagtaagttaacagcaaaagcaaataggcaacttcaagatcctttagtaatcatgacaggaaacatcccaacatggcttactgagctaggaaaaacctgcccatttttctttccttttgatacccggcaaatgcttttttatgtaactgcatttgatcgggaccgagcaatgcaaagattacttgataccaacccagaaatcaaccagtctgattctcaagatagcagagttgcacctagattggatagaaaaaaacgtactgtgaaccgagaggagctgctgaaacaggcggagtctgtgatgcaggacctcggcagctcacgggccatgttagaaatccagtatgaaaatgaggttggtacaggtcttgggcctacactggagttttatgcgcttgtatctcaggaactacagagagctgacttgggtctttggagaggtgaagaagtaactcttagcaatccaaaagggagccaagaagggaccaagtatattcaaaacctccagggcctgtttgcgcttccctttggtaggacagcaaagccagctcatatcgcaaaggttaagatgaagtttcgcttcttaggaaaattaatggccaaggctatcatggatttcagattggtggaccttccccttggcttacccttttataaatggatgctacggcaagaaacttcactgacatcacacgatttgtttgacatcgacccagttgtagccagatcagtttatcacctagaagacattgtcagacagaagaaaagacttgaacaagataaatcccagaccaaagagagtctacagtatgcattagaaaccttgactatgaatggctgctcagttgaagatctaggactggatttcactctgccagggtttcccaatatcgaactgaagaaaggagggaaggatataccagtcactatccacaatttagaggagtatctaagactggttatattctgggcactaaatgaaggcgtttctaggcaatttgattcgttcagagatggatttgaatcagtcttcccactcagtcatcttcagtacttctacccggaggaactggatcagctcctttgtggcagtaaagcagacacttgggatgcaaagacactgatggaatgctgtaggcctgatcatggttatactcatgacagtcgggctgtgaagtttttgtttgagattctcagtagttttgataatgagcagcagaggttatttctccagtttgtgactggtagcccaagattgcctgttggaggattccggagtttgaatccacctttgacaattgtccgaaagacgtttgaatcaacagaaaacccagatgacttcttgccctctgtaatgacttgtgtgaactatcttaagttgccggactattcaagcattgagataatgcgtgaaaaactgttgatagcagcaagagaagggcagcagtcgttccatctttcctgatcatagcaagaaatgcagtgtctgcctgttacagcaaaagaaacaaatcatgatttcttttctaatgttatcacctgagtcaaggaaacatgttacgccttcttgttgtaggaaaaacggcttgcagattataaagagacatttggttgatattcattaatggccccatggacttaaagtgatcaggccctaaaacgttgttgtgatgaggtttctttagcaagttcttgtttaaattatcatttatttgatgagtgaagtttttaacatgctttgctgtgtgaaatttaaaaaagggatgtttttccaggctggaacaataaatgtggctgtgcagtttaaaaaaaaaaaaaaa

SEQ ID NO: 72 - DNA, 514 bp, Homo sapiens
  misc_feature: Incyte ID No: 282397.106
ggacatgaaatgcctcgtggagaagctgtttgacttcttggggagcttgctcactatgtgctcctctgacgtgccgttactcagaggtgggtggccgtctcccttccctgtaccctggtgaagagcggtgcagtgccgtcactcagaggtgggtggccgtctcccttccctgtgtcctggtgaagagccgtgtagtgccatcactcagaggtgggtggccgtctcccttccctgtgtcctggtgaagagcggcgcagtgccgtcactcagaggtgagtggccgtctcccttccctgtgccctggtgaagagtggtgcagcagcttctcccctggtttcctcctcagagtccacgctgaggcggcgcagggtgtgcccgcagcctcgctgactgccacccacagcagcacactggcggaggaggtggtggcactgctgcacacgtgcactccctgactcggtggaatgggctcatcaacaagtacatcaactcccagtccgctccatcacccaca

SEQ ID NO: 73 - DNA, 2313 bp, Homo sapiens
  misc_feature: Incyte ID No: 282397.114
ctcgcccaaacaggaaagcaaacctgaaaatacactatcctccagctatcagaattatattgagatctactcacatttatgatgatgttcagagattctcattgggaaggaaaaggcacacgctgcggcggtcttgcatgactcggtggaatgggctcatcaacaagtacatcaactcccagctccgctccatcacccacagctttgcgggaaggccttccaaaggggcccagttagatgactacttccctgattccgagaaccctgaagtggggggcctcatggcggtcctggctgtggttggaggcatcgatggtcgcctgtgcctgggcggccaagttgtgcacgatgactttggagaagtcaccatgactcgcatcaccctgaagggcaaaatcaccgtgcagttctctgacatgcggacgtgtcgcgtttgcccattgaatcagctgaaaccactccctgccgtggcctttaatgtgaacaacctgcccttcacagagcccatgctgtctgtctgggctcagttggtgaacctcgctggaagcaagttagaaaagcacaaaataaagaaatcgactaaacaggcctttgcaggacaagtggacctggacctgctgcggcgccagcagttgaagctatacatcctgaaagcaggtcgggcgctgttctcccaccaggataaactgcggcagatcctgtctcagccagctgttcaggagactggaactgttcacacagaacccatggatacggagggctagctgtatatgtttattgctgtggaaacatgaaaacaatgatggagcagtggtatcacctgaccttggggacatgtctcctgaagggccgcagccccccatgatcctcttgcagcagctgctggcctcggccacccagccgtctcctgtgaaggccatatttgataaacaggaacttgagactgctgcactggccgttgtggagtccactcacccttcgagcccaggatttgaagactgcagctccagtgaggccaccacgcctgtcaacgtgcagcacatccgccctgccagagtgaagaggcgcaagcagtcacccgttcccgctctgccgatcgtggtgcagctcatggagatgggatttcccagaaggaacatcgagtttgccctgaagtctctcactggtgcttccgggaatgcgtccggcttgcctggtgtggaagccttggtcgggtggctgctggaccactccgacatacaggtcacggagctctcagatgcagacacggtgtccgacgagtattctgacgaggaggtggtggaggacatggatgatgccgcctactccatgtctactggtgctgttgtgacggagagccagacgtacaaaaaccgagctggtttcttgggtaatgatgattatgctgtatatgtgagagagaatattcaggtgagtaattgtcttaagctggagcctcgatccgtttttcactcagcaaatatttgggtatgtcctatatgccaaacatcagtggacagaggcccctgccctcagggagcctgccttctggtgctggaagacatacctgaccagtgagctcatggtacgctagaaggtgctgtgtaccctggaatgagagagagcagactacagtaaaggggtgggagtgagggcacagtccagggatcgggatctgcaatgagaaggtgagatgggtgcaaagcctacagggtgtgaagggtggctgagcaggatgggcaccccagacagaggctgctgtggctgccccggtgtagccagaggacagaggggcagatgggctcaggggcagccggagagcacaagtggcctgtccacggtggacatggcgcagggatggctgttttctactagccccacttgtgacacttcctacatacctttccttgtttttcttatgtaattctcattgccatcaaactttaaaaatctaattatgttttatatagtcctttatctactttaaatcatttcttgtcctaattctcttgttttagtatattttagagaaaatcccccaaatcatctcatttcacctgtatatatgtcagtgagtatcactaataaagaatcttaacataatgacatttctgtttaccagcattacctaacaaaataaataataattccttaatatcatctcatatctaacgcttgcttgtagttttccagttttctcagaaatggctttaatggttagtttttgaacttggataaaccaagattgtatgccttatctacatttggttgatggatctttgaagtctattccaagctagagtggttccccct

SEQ ID NO: 74 - DNA, 4892 bp, Homo sapiens
  misc_feature: Incyte ID No: 237183.1
gcccaggctgggctagaggggctgaggtactcccagactgctgacaacagcattccatgaggtatggtctgaatatgcgttgcttggcagctcgggtcaactataagactttgattattatctgcgcactcttcactttggtcacagtacttttgtggaataagtgttccagtgacaaagcaatccagtttccacggcgttcgagtagtggcttcagagtggatgggtttgacaaaagagcagcagcatctgagagtaacaactatatgaaccacgtggccaaacaacagtctgaggaagcattccctcaggaacagcagaaagcaccccctgttgttgggggcttcaatagcaatgtgggaagtaaggtgttagggctcaaatatgaagaaattgactgtctcataaatgatgaacacacaattaaagggagacgagaggggaacgaagtctttcttccattcactttgggttgagaaatattttgatgtttatggaaaggtggttcagtatgatggctatgatcggtttgaattctctcatagctattccaaagtctatgcacagagagccccctatcaccccgatggtgtgtttatgtcttttgaaggctacaatgtggaagtccgagacagagtcaagtgcataagtggggttgaaggtgtgccattatctacacaatggggacctcaaggctatttctatccaatccagattgcacagtatggattaagtcattacagcaagaatctaactgagaaacctcctcacatagaggtatatgaaacagcagaagacagagacaaaaacaagcctaatgactggactgtgccaaagggctgctttatggcgaatgtggctgataagtctagattcaccaatgtcaaacagtttattgcaccagaaaccagttgaggtgtatccttgcaactgggaaacacaaaagattttattatttcatttgacctcaagttcttgacaaatggaagtgtgtccgtggttctagagaccacagaaaagaatcagctcttcactatacattatgtctcaaatgctcagctaattgcttttaaagaaagagatatatactatggcattgggcccagaacttcatggagcacagttaccagggacctggtcactgacctcaggaaaggagtgggtctttcaaacacaaaagctgtcaagccaaccaaaataatgcccaagaaggtggttaggttgattgcaaaaggtaagggattcctcgacaacattaccatctctaccacagcccacatggctgcatttttttgctgctagtgattggctagtaaggaaccaggatgagaaaggtggctggccaattatggtgacccgtaagttaggggaagggttcaagtctttagagccaggatggtattctgccatggcccaagggcaagccatttctacattagtcagggcctatctgttaacaaaagaccatatattcctcaattcagctttaagggcaacagccccttataagtttctatctgagcagcatggagttaaagctgtgtttatgaataaacatgactggtatgaagaatatccaaccacacctagctcttttgttttaaatggctttatgtattctttaattgggctgtatgacttaaaagaaactgcaggggaaaaactcggaaaagaagcaaggtccttgtatgagcgtggcatggaatctcttaaagccatgctgcccttgtatgacactggctcaggaaccatctatgacctccgtcacttcatgcttggcatcgctcctaacctggctcgctgggactatcataccacccacatcaatcagttgcagctactcagtaccattgatgagtccccaatcttcaaagaatttgtcaagaggtggaaaagctaccttaaaggcggcagggcaaagcacaactagagctcacaaccaaaactgcacttcagcctctgctgtacacagaaactacaggctctgtctcaggagagcataggcacattttaaaaggttatgtactaggtttttgtggattctatcaaagtgataagtgatccttaaaaccagccttctaaaataattgcattccatgggttgggtatttagaaatgtaggtggcatttagaacacaatgtttaatcaatgggctgaacaaagatgcttcactttgccttgcccatcaccctatacagtttcgcagatagtctagtcactctatgtgagaaagataatggtaagtagttgctactggccaactgtctagcacttacctgaaaacttagtatggagctcttttaaaatgtgattatttatatttatgttgaaagcggactttaaaaaaaataatgtgctgtaacacagtaaatatgtacttgtagcctggatagcagactgtgttcaactttttaaaaagatgtttcctttctatagattaatttcttgggagcaaatgagtatttgttgcatttgttcaatttgttgtatatggtgaatatttaattatggttttcttgaaacgtgtaaattaaaaacacaatcagtgttcaggcttcagttatataatgtaagcacaactaaaatgaaacttgttgactgcacaagaaattacaaaaatgtttctgttttgaaacttgatctacaatcagtaaaagtttgataatcagtatatcccttcccaacccccattgtgacagtttctttttgtcactgtctagaattttgtattttatttcagactataccttggagttttgtatattttgagagagatatttttgggacattattttggaaacttattacaaatctaaatttggaaaggagctagtagctttaaggccaccaccatattttacttttttaggatttttccccctttaaataaaaatattagatcaaatactatatgcaagaaatcatagcaaagtttttttttcctaccaagatcattcttgatcatcagcttcccaaactagtaagtctgtgcatcattgggtgtttttttttaatttaattttaaattatcccagctattagatagaagggatgttactgcacttatgtgtaatcagatctttatttaggtatacatatcctcctataccgcacataaatagatttcagagcccccatacaatgggcagtgtctgctatagggcttcaggcattaaataaaaccgagggttgttgattttgctgtgacagtacactaaatcaatactatatcttatacagtttgaaaatatgataccctacactttcaggggaccgagtctgacaaacacaatacatttatctgtgacctatatcaagtacacatttaggagccaggtaggttacctgcttacacactatattttaattgaattcaaactatcaagcactacttagaaactggaaaacatatatatgttagcatcaaagggggcagaagcaaagaagatacagatctgcactgaagacattagactggccatagaaaagtaagcttgaactcccaattgatgtgaccacactcttcttaattttgttcacagtaaaaacacttttttgagttattaggcttacccctagcttttgacctttgcatttcatatatgttagatgtctcagcaagaatatctggtctcccctaatttttattcccagtgccgatgttcaaaataaactttctccagtctgggaaccttttttacttccccatatttgttattatttagaatggttcatacgtctgctttgtttgcatactggtcttcagattatgagactcgatgataacagtatggtactgcttctgtgacaaatatcgtgccttaacaatgtggctgtccttttccactgaagaaggaaagacgttttgatctagaaatagcgttgtgatttccttgctgttggttttacactgccttccacattgcaacagcaagttgatttcttgtgatcccagaattttctaagaggatgagttgaatctatagcagcattgtcagtacagaccagtggttctcaaactttaaaatgcctcagcatcacttgggagcttattgaaatgcagatcccagagtcagtaaatctgcctgtgaagtatgatagtctgcatttgtaatgagcattcaagtgattctgatgcaggtgagctgggggcatacagggaggaacactgccctggactatccattgcatttttgcctctaaacaactacagaattttctagggttttaaattatgtaaaatgtttacttattctgagcttagagagaatggggagggtatttttaaattttattgttttatttctttaagtttttctttgctttaagattataggtattaggtttgtttttgtttttccacttatcttgagttcactttgatgttaaatctattgctacttcagttgtaaaaccagccaaaagtttctggatgaaggtcaagtttgaccttttaggagttattgtacataaaggcttcatccacgaaccatccagcgcacagaagcaagtgcaaaaatgacacaagcacaactctccagacgtggctccttctcctttctcagtgcagactctcactgaaagctgctattttcatcctccttgtggttgcttttcttgtttctcttccattgtacatgtgggttatataccatatgttaaatatgcaataaagtgtttacaggatgcccttctgaagggtagtcctttgtaaagctgtacagactttgcagtttaagcacaatgtgcacatgttagttttatatacagcaaaacttgattttttgcagatggaaaggtattttgtttctatacaaagtaaatggattgtttgtgcttaatgtaaagccgctttataaaactgtaaaataaagtttttttcttaaaaaga

SEQ ID NO: 75 - DNA, 6510 bp, Homo sapiens
  misc_feature: Incyte ID No: 234729.3
gccagttgttaccctgacttcatactgggaggatattagtcatcgcctggatgcggtgaacactctcctagctatggcagaacggctgcaaacaaatatagaagctctaaaatcagggatacaaggtaaaattcctgcaaaccagctggctgaattgtggctgaagctgatagatgaagttatagaagacacgagatacacgttgcctctcacagaaggaaaagccaacgtcacagttctcgatactcagatccgaaagctgcggtccaggtctctctcccaaatacatgaggcggctgtgaggatgaggtcggaggtcaccaaagtaaagaacagccggcggatgctgtcaaataagccacaggacttccagatccgcgtccgagtgattgagggccgacagttaagtgcgtaacaacataaggcctgtggtcaaagttcacgtctgtggccagacacaccgaacaagaatcaagagaggaaacaaccctttttttgatgagttgtttttctacaatgtcaacatgaccccttctgaattgatggatgagatcatcagcatccgggtttataattctcactctctgcgggcagattgtctgatgggggaatttaagattgatgttggatttgtttatgatgaacctggccatgctgtcatgagaaagtggcttcttctcaatgacccggaagataccagttcaggttctaaaggttatatgaaagtcagcatgtttgtcctgggaaccggagatgagcctcctcctgagagacgagatcgtgataatgacagtgatgatgtggagagtaatttgttactccctgctggcattgccctccggtgggtgaccttcttgctgaaaatctaccgagctgaggacatcccccagatggatgatgccttctcacagacagtaaaggaaatatttggaggcaatgcagataagaaaaatctcgtggatccttttgtagaagtttcctttgctggaaaaaaggtttgtacaaacataattgagaaaaatgcaaacccagagtggaatcaggtcgtcaatcttcagatcaagtttccttcagtgtgtgaaaaaataaaactaacaatatatgactgggaccgtcttactaaaaatgatgtagttggaacaacatatctacacctctctaaaattgctgcctctggtggggaagtggaagatttctcatcttcgggaactggggctgcatcatatacagtaaacacaggagacacagagttaggctttgttccaacgtttggaccttgttacctgaatctttatggaagcccaagagatacacgggattcccagacccatatgatgagctgaatactggaaagggggaaggagttgcctacagaggcaggatcttggttgaattagccacttttcttgagaagacaccaccagataaaaagcttgagcccatttcaaatgatgacctgctggttgttgagaaataccagcgaaggcggaagtacagcctgtctgccgtgtttcattcagccaccatgttgcaagatgttggtgaggccattcagtttgaagtcagcattgggaactatggcaacaagtttgacaccacctgtaagcctttggcatcaacaactcagtacagccgtgctgtatttgatggcaactactattattacttgccttgggcccacaccaagccagttgttaccctgacttcatactgggaggatattagtcatcgcctggatgcggtgaacactctcctagctatggcagaacggctgcaaacaaatatagaagctctaaaatcagggatacaaggtaaaattcctgcaaaccagctggctgaattgtggctgaagctgatagatgaagttatagaagacacgagatacacgttgcctctcacagaaggaaaagccaacgtcacagttctcgatactcagatccgaaagctgcggtccaggtctctctcccaaatacatgaggcggctgtgaggatgaggtcggaagccacagatgtgaagtccacactggcagaaattgaggctggttgataaattaatgccagctgactgaagagccaccagaaccagcatgcctgacatcatcatctggatgatccgggggagagaagagactggcctatgcacgaattcccgcacatcaggtcttgtactccaccagtggtgagaatgcatctggaaaatactgtgggaaaacccaaaccatctttctgaagtatccacaggagaaaaacaacgggccaaaggtgcctgtggagttgcgagtgaacatctggctaggcttaagtgctgtggagaagaagtttaacagcttcgcagaaggaactttcaccgtctttgctgaaatgtatgaaaatcaagctctcatgtttggaaaatggggtacttctggattagtaggacgtcataagttttctgatgtcacaggaaaaataaaactcaagagggaattttttctgcctccaaaaggctgggaatgggaaggagagtggatagttgatcctgaaagaagcttgctgactgaggcagatgcaggtcacacggagttcactgatgaagtctatcagaacgagagccgctaccccgggggcgactggaagccggccgaggacacctacacggatgcgaacggcgataaagcagcatcacccagcgagttgacttgtcctccaggttgggaatgggaagatgatgcatggtcttatgacataaatcgagcggtggatgagaaaggctgggaatatggaatcaccattcctcctgatcataagcccaaatcctgggttgcagcagagaaaatgtaccacactcatagacggcgaaggctggtccgaaaacgcaagaaagatttaacacagactgcttcaagcaccgcaagggccatggaggaattgcaagaccaagagggctgggaatatgcttctctaattggctggaaatttcactggaaacaacgtagttcagataccttccgccgcagacgctggaggagaaaaatggctccttcagaaacacatggtgcagctgccatctttaaacttgaaggtgcccttggggcagacactaccgaagatggggatgagaagagcctggagaaacagaagcacagtgccaccactgtgttcggagcaaacacccccattgtttcctgcaattttgacagagtctacatctaccatctgcgctgctatgtctatcaagccagaaacctcttggctttagataaggatagcttttcagatccatatgctcatatctgtttcctccatcggagcaaaaccactgagatcatccattcaaccctgaatcccacgtgggaccaaacaattatattcgatgaagttgaaatctatggggaaccccaaacagttctacagaatccacccaaagttatcatggaactttttgacaatgaccaagtgggcaaagatgaatttttaggacgaagcattttctctcctgtggtgaaactgaactcagaaatggacatcacacccaaacttctctggcacccagtaatgaatggagacaaagcctgcggggatgttcttgtaactgcagagctgattctgaggggcaaggatggctccaaccttcccattcttccccctcaaagggcgccaaatctatacatggtcccccaggggatcaggcctgtggtccagctcactgccattgagattctagcttggggcttaagaaatatgaaaaacttccagatggcttctatcacatcccccagtcttgttgtggagtgtggaggagaaagggtggaatcggtggtgatcaaaaaccttaagaagacacccaactttccaagttctgttctcttcatgaaagtgttcttgcccaaggaggaattgtacatgcccccactggtgatcaaggtcatcgaccacaggcagtttgggcggaagcctgtcgtcggccagtgcaccatcgagcgcctggaccgctttcgctgtgacccttatgcagggaaagaggacatcgtcccacagctcaaagcctcccttctgtctgccccaccatgccgggacatcgttatcgaaatggaagacaccaaaccattactggcttctaagctgacagaaaaggaggaagaaatcgtggactggtggagtaaattttatgcttcctcaggggaacatgaaaaatgcggacagtatattcagaaaggctattccaagctcaagatatataattgtgaactagaaaatgtagcagaatttgagggcctgacagacttctcagatacgttcaagttgtaccgaggcaagtcggatgaaaatgaagatccttctgtggttggagagtttaagggctcctttcggatctaccctctgccggatgaccccagcgtgccagcccctcccagacagtttcgggaattacctgacagcgtcccacaggaatgcacggttaggatttacattgttcgaggcttagagctccagccccaggacaacaatggcctgtgtgacccttacataaaaataacactgggcaaaaaagtcattgaagaccgagatcactacattcccaacactctcaacccagtctttggcaggatgtacgaactgagctgctacttacctcaagaaaaagacctgaaaatttctgtctatgattatgacacctttacccgggatgaaaaagtaggagaaacaattattgatctggaaaaccgattcctttcccgctttgggtcccactgcggcataccagaggagtactgtgtttctggagtcaatacctggcgagatcaactgagaccaacacagctgcttcaaaatgtcgccagattcaaaggcttcccacaacccatcctttccgaagatgggagtagaatcagatatggaggacgagactacagcttggatgaatttgaagccaacaaaatcctgcaccagcacctcggggcccctgaagagcggcttgctcttcacatcctcaggactcaggggctggtccctgagcacgtggaaacaaggactttgcacagcaccttccagcccaacatttcccagggaaaacttcagatgtgggtggatgttttccccaagagtttggggccaccaggccctcctttcaacatcacaccccggaaagccaagaaatactacctgcgtgtgatcatctggaacaccaaggacgttatcttggacgagaaaagcatcacaggagaggaaatgagtgacatctacgtcaaaggctggattcctggcaatgaagaaaacaaacagaaaacagatgtccattacagatctttggatggtgaagggaattttaactggcgatttgttttcccgtttgactaccttccagccgaacaactctgtatcgttgcgaaaaaagagcatttctggagtattgaccaaacggaatttcgaatcccacccaggctgatcattcagatatgggacaatgacaagttttctctggatgactacttgggtttcctagaacttgacttgcgtcacacgatcattcctgcaaaatcaccagagaaatgcaggttggacatgattccggacctcaaagccatgaacccccttaaagccaagacagcctccctctttgagcagaagtccatgaaaggatggtggccatgctacgcagagaaagatggcgcccgcgtaatggctgggaaagtggagatgacattggaaatcctcaacgagaaggaggccgacgagaggccagccgggaaggggcgggacgaacccaacatgaaccccaagctggacttaccaaatcgaccagaaacctccttcctctggttcaccaacccatgcaagaccatgaagttcatcgtgtggcgccgctttaagtgggtcatcatcggcttgctgttcctgcttatcctgctgctcttcgtggccgtgctcctctactctttgccgaactatttgtcaatgaagattgtaaagccaaatgtgtaacaaaggcaaaggcttcatttcaagagtcatccagcaatgagagaatcctgcctctgtagaccaacatccagtgtgattttgtgtctgagaccacaccccagtagcaggttacgccatgtcaccgagccccattgattcccagagggtcttagtcctggaaagtcaggccaacaagcaacgtttgcatcatgttatctcttaagtattaaaagttttattttctaaagtttaaatcatgtttttcaaaatatttttcaaggtggctggttccatttaaaaatcatctttttatatgtgtcttcggttctagacttcagcttttggaaattgctaaatagaattcaaaaatctctgcatcctgaggtgatatacttcatatttgtaatcaactgaaagagctgtgcattataaaatcagttagaatagttagaacaattcttatttatgcccacaaccattgctatattttgtatggatgtcataaaagtctatttaacctctgtaatgaaactaaataaaaatgtttcacctttaaaaaaaaaataacat

SEQ ID NO: 76 - DNA, 4937 bp, Homo sapiens
  misc_feature: Incyte ID No: 234423.21
gaaaaagagacacaagcactaacaccagtttctgatggcagggaagtccccaaggattctgcattacaaagagttcttttgtttatcccatgatgaatccaatagcgaaccacattcacagagctcatacaggcacaaggaaatgggccaaaatctgagagagacagtgtcctattgtcttattgatgatgaatgccctttaatggtgccagcttttgataagagcgaagctcaagtgctgaacccagagcataaagtcactgagactgaagacacacaaatggtctccaaaggaaaggatttgggaacccaaaatcatacctcagaattgattctaagtagcccgccaggacaaaaggtgggctcgtcatttggactgacttgggatgcaaatgatatggtcattagcacagacaaaacgatgtgcatgtcaacaccagtcctagaacccacaaaagtaaccttttctgtttcaccgattgaagcgacggagaaatgtaagaaagtggagaagggtaatcgagggcttaaaaacataccagactcgaaggaggcacctgtgaacctgtgtaaacctagtttaggaaaatcaacaatcaaaacgaataccccaataggctgcaaagttagaaaaactgaaattataagttacccaagaccaaacttcaagaatgtcaaagcaaaagttatgtctagagcagtgttgcagcccaaagatgctgctttatcaaaggtcacgcccagacctcagcagaccagtgcctcatcaccctcatcagtgaattcaagacaacaaacagtcttgagcagaacaccgagatctgacttgaatgcagacaaaaaagcagaaattctaattaacaagacacataagcagcagtttaataaactcattactagccaggctgtgcatgttacaactcattctaaaaatgcttcacacagggttccaagaacaacatctgccgtgaaatcgaatcaggaagatgttgacaaagccagttcttctaactcagcatgcgagaccgggtccgtttctgcgttgtttcagaagatcaaaggcatactccctgttaaaatggaaagtgcagaatgtttggaaatgacctatgttcccaacattgataggattagccctgaaaagaagggtgaaaaagaaaatgggacatctatggaaaaacaagagctgaaacaagagattatgaatgagacttttgaatatggttctctgtttttgggctctgcttcaaaaacaacgaccacctcaggtaggaatatatccaagcctgactcctgcggtttgaggcaaatagctgctccaaaagccaaagtggggccccctgtttcctgtttgaggcggaacagtgacaatagaaatcccagtgctgatcgagccgtatctcctcagaggatcaggcgtgtgtccagttctgctggtaatgccgctgtcatcaaatatgaggagaaacctccaaaaccagcatttcagaatggttcctcaggatccttttatttgaagcctttggtatccagggctcatgttcacttgatgaaaactcctccaaaaggtccttcgagaaaaaatttatttacagctcttaatgcagttgaaaagagcaggcaaaagaatcctcgaagcttatgtatccagccacagacagctcccgatgcgctgccccctgagaaaacacttgaattgacgcaatataaaacaaaatgtgaaaaccaaagtggatttatcctgcagctcaagcagcttcttgcctgtggtaataccaagtttgaggcattgacagttgtgattcagcacctgctgtctgagcgggaggaagcactgaaacaacacaaaaccctatctcaagaacttgttaacctccggggagagctagtcactgcttcaaccacctgtgagaaattagaaaaagccaggaatgagttacaaacagtgtatgaagcattcgtccagcagcaccaggctgaaaaaacagaacgagagaatcggcttaaagagttttacaccagggagtatgaaaagcttcgggacacttacattgaagaagcagagaagtacaaaatgcaattgcaagagcagtttgacaacttaaatgctgcgcatgaaacctctaagttggaaattgaagctagccactcagagaaacttgaattgctaaagaaggcctatgaagcctccctttcagaaattaagaaaggccatgaaatagaaaagaaatcgcttgaagatttactttctgagaagcaggaatcgctagagaagcaaatcaatgatctgaagagtgaaaatgatgctttaaatgaaaaattgaaatcagaagaacaaaaaagaagagcaagagaaaaagcaaatttgaaaaatcctcagatcatgtatctagaacaggagttagaaagcctgaaagctgtgttagagatcaagaatgagaaactgcatcaacaggacatcaagttaatgaaaatggagaaactggtggacaacaacacagcattggttgacaaattgaagcgtttccagcaggagaatgaagaattgaaagctcggatggacaagcacatggcaatctcaaggcagctttccacggagcaggctgttctgcaagagtcgctggagaaggagtcgaaagtcaacaagcgactctctatggaaaacgaggagcttctgtggaaactgcacaatggggacctgtgtagccccaagagatcccccacatcctccgccatccctttgcagtcaccaaggaattcgggctccttccctagccccagcatttcacccagatgacacgtccccaaagtccacagactctctgaaagcattttgatgcaggtctgcaggactgaccccaaggaggaacgtgggcacaagaggtatatcagcacacgtgtgatcaccgtagggtaactggagcgtcaccaccggcggaatcgcagcttctgagactggaactctggaggaagacgtttgcctccgtccaaaagattcctccaaaaaaagatttaaaaaaagatttcggcatcgacaccggacgttgttgcacaaagcacttaaagaacgagagcatcttgttcattgcctttttcacctaagcatagggggaaaaactctcagggccctattaagatttataacctttgtaatgttcttcaccacagacaccttcttgtgagttttcagtctgactgtgggggtggggggtgtgaatgaaatggatgtcacagagtgtcatgtgtctgatgcagcctcctctgctgtgtattaaatgtcaaaatctgaatatatctggatatgtactaatcaaataataatcaatcagcatatacatttcagccaaagccatagaagaaaaagcaatagttgcttgaattatgatcatctaccaccaactctgctcagccctgtaacagggtagggagagggtataacaggaagagctttgacttgtccctgtctatacattctctgtatcttttgggggtaacttcttggcagtttttcagtgttcagccatgtcagttgaaactagatttttctgtagattttttacttacccatgtgagcctaacactatcctgtaattcattttctcaggctatgtgtaaatgtagaaccctaatttttctataaaaaaacaaactaactaactgtgtaaagaaagaaaaagggaagtaccaatgggtttttccaccttatttttacctttgatctacccttgcagatttaacctgtcttcttccctcccattattctcattttccttttacctttctccaccatccagagccacaaaagcaaaccttctacctcctacctacttttctctgggacaaggataaaggaatatgattttccagagccccagagccagctcatcttccaggtgctgaaaccactttccaaataaactaaagcctggatttgatattacaaattttgggaaatcttagaataaagaacgagaacaaggaagtcattggctagtataattaagaaaggtaggattcagtgcttaccgatgatgcagtacttgatagaagaaaacagtctgggaggatagcgctcatttttcagttaccctttaaggagtccctttgtctttgggaaagtagcagaatggtccgcttctttcccatgagtggaaaatgtggcttgtccaactctcctccaggttgcatttcagtttctttccaaaacttattacctcccctaatcctgagactttggaaaaggtggaaggaagaactgttgctttatctccccctccctgcatgtgtcaacattgtgatgtcagtatttactaatctgcattcagtggctgtacaaataacagctgtagtaagaagagattcaggatgctagaggtgaatatttgggtcatttacatgtacactacatagcaagttgatactcatgttgcatgttcttttaaattagtgattttgtgtcttaagtctttaacttccaatacttcatcatgtatgtaaccttccatgtttgcttctgataaatggaaatgtaggttcactgccacttcatgagatatctctgctcacgcttccaagttgttctcaatgacattagccaaagttgggtttgccattcatcccctaggcatggtaaatcttgtgttgttccctgctgtcctccgtattacgtgaccggcaaataaatctcatagcagttaatataaaacatctttggaggatgggagagaacaggagggaagatgggaaacaaaatagagaattcttaagattttgtttaaaccaaatgtttcatgtagaatgcaaaatgttggcacgtcaaaaatatgaatgtgtagacaactgtagttgtgctcagtttgtagtgatgggaagtgtattttactctgatcaaataaataatgctggaatactcaaaaaaaaaaaaaaagggcaaattc

SEQ ID NO: 77 - DNA, 2196 bp, Homo sapiens
  misc_feature: Incyte ID No: 203036.1
ttagaaattaaatctgttcttttggatgagatattaaaggatccagaacatccaaacaaggattacctaattaactttgagattcggtctctgcgagatagccgagcactgattgagaaggttggaattaaagatgcatctcagttcatagaggacaatccacacccccgactttggcgcctactggctgaagcagctcttcagaaactggatctatacactgcagagcaagcatttgtgcgctgcaaagattaccaaggcattaagtttgtgaagcgcttgggcaaactactgagtgagtcaatgaaacaggctgaagttgttggctacttcggcaggtttgaagaggctgaaagaacgtatctcgagatggacagaagggatcttgctattggcctccggctgaaattgggggattggtttagagtactccagctcctgaaaactggatctggtgatgcagatgacagtctcctggaacaagccaacaatgccattggagactactttgctgatcgacaaaagtggttgaatgctgtacaatattatgtacaaggacggaaccaggaacgcttagctgaatgttactatatgttagaggattatgaagggttagagaaccttgccatttcacttccagaaaaccacaagttacttccagaaatagcacaaatgtttgtcagagttggaatgtgtgaacaagcagtgactgcatttttgaaatgtagtcaaccaaaggcagcagtagatacctgcgtacatctcaaccaatggaacaaagctgttgaattggctaaaaatcatagtatgaaagaaattggatctctgttagctaggtatgcatctcatttactggaaaagaataaaactcttgatgccatagaactctatcggaaagccaattacttttttgatgcagctaaactgatgtttaagattgcagatgaagaggcaaagaaaggaagtaaacctttacgtgtcaagaagctctatgtactgtcagccttacttatagagcaataccatgaacagatgaagaatgcccagcgaggaaaagttaaaggaaaaagttcagaggccacttctgccttggctggtttgctggaagaagaagttctgtctacaacagatcgtttcacagataatgcatggagaggggcagaggcttaccacttctttatacttgcacagaggcagctctatgagggatgtgtggacactgcactgaagacagctcttcacctgaaagactatgaagacatcatccctcctgtggagatctactctctgctagcactctgcgcatgcgccagcagagcctttgggacttgttcaaaagctttcattaaacttaaatctttagagaccctcagttcagaacagaaacagcagtatgaagaccttgctttagaaatcttcaccaaacatacttcaaaagataacagaaaacctgaattggacagccttatggaaggtggagaagggaaactgccaacatgcgttgccacaggaagcccaatcactgagtatcaattctggatgtgcagtgtatgcaaacacggtgtccttgctcaggaaataagccactacagcttctgccccttatgccatagtccagtgggataaaggaatgataaactgtatataactgtaaaatatatgtagcatatatacatggctatatgctgtatatgtaataaggtttatttctgtgagttttgtatgaaaatcagcctcattatttatagttgaatttttgcacaaaatatatgttaataaaataatttttatggcaatacaactgtgaaataataaggccgattttcatataaatgtatgaaaatcaaccatgttttctctcaccctctctcttttgtttatcttgtttttggttacatgataccatggaaatattccaaataaatttttttctcacagtgtcaaggtaactgaattcattaaaaaatcttgaagggagtagggagtgggggaagcatgggagtggggcaaagttgaatttagagaatttttataacccatgttacaaggaagttaaacaattgtaataatgaaatgagctttctctatagccatatttaattaaataagtgtcgaatgtcttctttattgtattttcagaagtgaggcgatggcattttaagacattttttacaatctgaattgtttctaatagcc

SEQ ID NO: 78 - DNA, 1278 bp, Homo sapiens
  misc_feature: Incyte ID No: 2802282CB1
accatggggaacaagcagaccatcttcaccgaagagcagctagacaactaccaggactgcaccttcttcaataagaaggacatcctcaagctgcattcgcgattctatgagctggcccccaacctcgtcccaatggactacaggaagagccccatcgtccacgtgcccatgagcctcatcatccagatgccagagctccgggagaatcccttcaaagaaaggatcgtggcggcgttttccgaggatggtgaggggaacctcactttcaacgactttgtggacatgttttccgtgctctgcgagtcggctccccgagagctcaaggcaaactatgccttcaagatctatgacttcaacactgacaacttcatctgcaaggaggacctggagctgacgctggcccggctcactaagtcagagctggatgaggaggaggtggtgcttgtgtgcgacaaggtcattgaggaggctgacttggacggtgacggcaagctgggctttgctgacttcgaggacatgattgccaaggcccctgacttcctcagcactttccacatccggatctgaggacactgccgaggctgtaggggcctagaagtccaccatcctgccctgcagtcacatgggtgtggcctccaagctccccaggaaagcagtggcagcctctggggtttacaccacaaatatatcctgtggccctttcagcaaaaaaaaaaccttaaccaggaagggggcctgtgaaggttaggacccttcccacagccccgctgtggtccagccccgggacccatggcctctctccaggccctccgcaccccgccccatgccccagtcctttcctactccagaaatgctccccacccccccaagagggaaaagcagataacccaacaggaggtggtggggtctgacgtgtccaagtgctggcagacaccctggtcacccaggacagagcggaaaaaaaaaaaagaggtcagggttttaacgagctatgcaatctttttccaaaacccaaggttgggctgcttcccacccctgcctgttccccttctcccggcctccttcacaatgtgaagctgtgggtgcagtgggcccaagggctcttgctcctgtctctgcctctgggtcatgagtaccaccctgcctgcctccccaacaccgtggaatcctcactggtgtgctgtccacagatttgtgaactcctggtagtaaaacacttttgcatcccaaaaaaaaaaaaaaaaaaaaaaaaaaaaaaaaaacaaaaaaaaaaaaaaa

SEQ ID NO: 79 - DNA, 4480 bp, Homo sapiens
  misc_feature: Incyte ID No: 225080.16
  unsure 3864, 3990, 4100: a, t, c, g, or other
ctgcagagtggcttcctgccttactgtgagcccgtctaccagcgctgtgtcaccctggtgcagaagacactggctcaggccatgatgtacacccagcaccctgagcagtatgaggctcccgacaaggacttcatgatgcgtagagcactgcagcagcaatgacggagggcacgtgtctgcggcgccgagggggcccctacaagaccgagcccgccaccggacctcggccgctggcgactcaactgcgagaggggccggcagacgtggacctacctgcaggacgagcgcgccggccgcgagcagaccggcctggaagcctacgccctggggctggacaccaagaattactttaaggacttgcccaaagcccacaccgcctttgagggggctctgaacgggatgacattttacgtggggctgcaggctgaggatgggcactggacgggtgattatggtggcccacttttcctcctgccaggcctcctgatcacttgccacgtggcacgcatccctctgccagccggatacagagaagagattgtgcggtacctgcggtcagtgcagctccctgacggtggctggggcctgcacattgaggataagtccaccgtgtttgggactgcgctcaactatgtgtctctcagaattctgggtgttgggcctgacgatcctgacctggtacgagcccggaacattcttcacaagaaaggtggtgctgtggccatcccctcctgggggaagttctggctggctgtcctgaatgtttacagctgggaaggcctcaataccctgttcccagagatgtggctgtttcctgactgggcaccgggaaaaccctccacactctggtgccactgccggcaggtgtacctgcccatgagctactgctacgccgttcggctgagtgccgcggaagacccgctggtccagagcctccgccaggagctctatgtggaggacttcgccagcattgactggctggcgcagaggaacaacgtggcccccgacgagctgtacacgccccacagctggctgctccgcgtggtatatgcgctcctcaacctgtatgagcaccaccacagtgcccacctgcggcagcgggccgtgcagaagctgtatgaacacattgtggccgacgaccgattcaccaagagcatcagcatcggcccgatctcgaaaaccatcaacatgcttgtgcgctggtatgtggacgggcccgcctccactgccttccaggagcatgtctccagaatcccggactatctctggatgggccttgacggcatgaaaatgcagggcaccaacggctcacagatctgggacaccgcattcgccatccaggctctgcttgaggcgggcgggcaccacaggcccgagttttcgtcctgcctgcagaaggctcatgagttcctgaggctctcacaggtcccagataaccctcccgactaccagaagtactaccgccagatgcgcaagggtggcttctccttcagtacgctggactgcggctggatcgtttctgactgcacggctgaggccttgaaggctgtgctgctcctgcaggagaagtgtccccatgtcaccgagcacatccccagagaacggctctgcgatgctgtggctgtgctgctgaacatgagaaatccagatggagggttcgccacctatgagaccaagcgtggggggcacttgctggagctgctgaacccctcggaggtcttcggggacatcatgattgactacacctatgtggagtgcacctcagccgtgatgcaggcgcttaagtatttccacaagcgtttcccggagcacagggcagcggagatccgggagaccctcacgcagggcttagagttctgtcggcggcagcagagggccgatggctcctgggaaggctcctggggagtttgcttcacctacggtcacctggctttggcctggaggccttcgcctgtatggtggctagacctaccgatggatcgtggactgcctgtgcagagagtctcccgggcctgatgacattccatgctgatcccgacagagtggcaagacgcgaggcctgagggaggaagcgactgttgagtcctgcgaggagacggcgattaattatgcatgacgtgcccatcatcccagaatccaataacacaatgctgggccatgatggggctgatggccgttcggcatcctgcacatcgaggcccagcgtgagaggatgtccggtgctctacttgatgataacagctcctccaatggcgactggccgtcgtaacacattgctgaggtctacaacacacgttcctgtgccagctgcctacacgagtctacaggaactatcttccccatcatgggccctcggccgcttctcccagctgtaccctgagagagcccttgctggccacccctgagaacatgcctacctgctgggtgccgtctgtgcgttccagtgaggccaaggggtcctggccgggtctggggagccctcccataaccctgtcttgggctccaacccctcaacctctatctcatagatgtgaatctgggggccaggctggaggcagggatggggacagggtgggtggcttagactcttgatttttactgtaggttcatttctgaaagtagctttgtcggagcttgggtgaggaagggggcacaggagccgtgacaccctgaggaggcacagcgccttctgccacctctgggcacgggctccagggtaatggaggctaggaggttttttctgaccaatagctgagttcttgggagacggagcagctgtgcctgtgtgattccttagtgtcgagtgggctctgggctggggtcggccctgggcaggcttctcctgcaccttttgtctgctgggctgaaggaaacgaaggccaaccttgtgacactggcaggtagtgtgcatccgtgaatagcccagtgcgggggttgctcatggagcatcctgaggccgtgcagcagggagccccatgcccctgggttcgttgagctttgcctgcggtatgggggtggtgtcatggagcctcatgcccctgggtcgtgagctcgcctgagtatggggtggtgtcatggagccgcataaccctgggttgtgagctcgcctgcattatgcagggtctgtcatggaacatcccaagccctgcggaaactgggagccccatgcccctgtgggacatgaacccacctgcgtggaatgctgtacgtagaggtgtctacagaggtttatagtatgtcttgtggacacagaaatgacagaaatgcacagggggacacttacggacaccagaaatgcacaggggaaggccgagcataaccagggggtgaggggcaggcagcagttgttagttactgcccgcggggcacttgctatgtgcacctgacagccaacaaccatgttccataatcactccctgggactggctggcaggtatggcacccttgggagccccgggcatatacccagggcacccctacggctgccgccagtctcatgcccaggtgggtgctctgggctcggagcgagggccaggttttgggaccgaggcttcccccaaggcaaatcctgtgagctcccttctagcctctgacccagtctggtctggcttgcatggatgtagggcttggggtgggaagttcaggtcctggctttgcctttgcctgatgtggatgagcagctcacatgctcagggccacctgagactgtcactgctctcccctggctaatgggaagaatcacatgaaaactctctgcgtaaccccgtgtggtttgccaagggacaaccctatacctccgttatctgctcttcccgctccctgccggcgcttctgggcaggtagcagtccctgtggcctctcccncctgtgctgatcactctccctcaggcagtggagatctgcgtctggaacaccctcagatcctgtcatgtggcctgcccagagtcccttcagggggcaccctctctgccttggtgtgcggtccaaggnttcttcacccaggtgccgcaccctctgggggtcttctgtccagctcccttgccccatgtgctgtcactgactctccttgggactcgcctgcctgcctccaagaaccctgnagggcttgggtccagctgccctgttcagtgtccaaacacttcccctgcacatccttaaaaactgggcttttattttcgcctgaaggaactgtgtgtgggaccccttgacatctgtccaggtttgcacatgcctgtttttttttcctcagcccacgtgttctcccccacgtgggggtagcagtcaggacagacagtgaatcacagagtctgccctgagacagaggctgctgtccctgggactccaagccatggtcagactgtacaaaacggttttccagaaatgaaatgtaaatcccatttttatactgaaaatgttactgaaagtcacttttatgagcatctgccttaataaacagacattgattcccttaaaaaaaaaa

SEQ ID NO: 80 - DNA, 3165 bp, Homo sapiens
  misc_feature: Incyte ID No: 1352170CB1
ccggtttccagccatggctgccattacctgaccagcgccacagccggtctctctgcaggcgccgggagaagtgaccagagcaatttctgcttttcacagggcgggtttctcaacggtgacttgtgggcagtgccttctgctgagcgagtcatggcccgaaggcagaactaactgtgcctgcagtcttcactctcaggatgcagccgaggtgggcccaaggggccacgatgtggcttggagtcctgctgacccttctgctctgttcaagccttgagggtcaagaaaactctttcacaatcaacagtgttgacatgaagagcctgccggactggacggtgcaaaatgggaagaacctgaccctgcagtgcttcgcggatgtcagcaccacctctcacgtcaagcctcagcaccagatgctgttctataaggatgacgtgctgttttacaacatctcctccatgaagagcacagagagttattttattcctgaagtccggatctatgactcagggacatataaatgtactgtgattgtgaacaacaaagagaaaaccactgcagagtaccagctgttggtggaaggagtgcccagtcccagggtgacactggacaagaaagaggccatccaaggtgggatcgtgagggtcaactgttctgtcccagaggaaaaggccccaatacacttcacaattgaaaaacttgaactaaatgaaaaaatggtcaagctgaaaagagagaagaattctcgagaccagaattttgtgatactggaattccccgttgaggaacaggaccgcgttttatccttccgatgtcaagctaggatcatttctgggatccatatgcagacctcagaatctaccaagagtgaactggtcaccgtgacggaatccttctctacacccaagttccacatcagccccaccggaatgatcatggaaggagctcagctccacattaagtgcaccattcaagtgactcacctggcccaggagtttccagaaatcataattcagaaggacaaggcgattgtggcccacaacagacatggcaacaaggctgtgtactcagtcatggccatggtggagcacagtggcaactacacgtgcaaagtggagtccagccgcatatccaaggtcagcagcatcgtggtcaacataacagaactattttccaagcccgaactggaatcttccttcacacatctggaccaaggtgaaagactgaacctgtcctgctccatcccaggagcacctccagccaacttcaccatccagaaggaagatacgattgtgtcacagactcaagatttcaccaagatagcctcaaagtcggacagtgggacgtatatctgcactgcaggtattgacaaagtggtcaagaaaagcaacacagtccagatagtcgtatgtgaaatgctctcccagcccaggatttcttatgatgcccagtttgaggtcataaaaggacagaccatcgaagtccgttgcgaatcgatcagtggaactttgcctatttcttaccaacttttaaaaacaagtaaagttttggagaatagtaccaagaactcaaatgatcctgcggtattcaaagacaaccccactgaagacgtcgaataccagtgtgttgcagataattgccattcccacgccaaaatgttaagtgaggttctgagggtgaaggtgatagccccggtggatgaggtccagatttctatcctgtcaagtaaggtggtggagtctggagaggacattgtgctgcaatgtgctgtgaatgaaggatctggtcccatcacctataagttttacagagaaaaagagggcaaacccttctatcaaatgacctcaaatgccacccaggcattttggaccaagcagaaggctaacaaggaacaggagggagagtattactgcacagccttcaacagagccaaccacgcctccagtgtccccagaagcaaaatactgacagtcagagtcattcttgccccatggaagaaaggacttattgcagtggttatcatcggagtgatcattgctctcttgatcattgcggccaaatgttattttctgaggaaagccaaggccaagcagatgccagtggaaatgtccaggccagcagtaccacttctgaactccaacaacgagaaaatgtcagatcccaatatggaagctaacagtcattacggtcacaatgacgatgtcggaaaccatgcaatgaaaccaataaatgataataaagagcctctgaactcagacgtgcagtacacggaagttcaagtgtcctcagctgagtctcacaaagatctaggaaagaaggacacagagacagtgtacagtgaagtccggaaagctgtccctgatgccgtggaaagcagatactctagaacggaaggctcccttgatggaacttagacagcaaggccagatgcacatccctggaaggacatccatgttccgagaagaacagataatccctgtatttcaagacctctgtgcacttatttatgaacctgccctgctcccacagaacacagcaattcctcaggctaagctgccggttcttaaatccatcctgctaagttaatgttgggtagaaagagatacagaggggctgttgaatttcccacataccctccttccaccaagttggaacatccttggaaattggaagagcacaagaggagatccagggcaaggccattgggatattctgaaacttgaatattttgttttgtgcagagataaagaccttttccatgcaccctcatacacagaaaccaattttcttttttatactcaatcatttctagcgcatggcctggttagaggctggttttttctcttttcctttggtccttcaaaggcttgtagttttggctagtccttgttctttggaaatacacagtgctgaccagacagcctccccctgtcccctctatgacctcgccctccacaaatgggaaaaccagactacttgggagcaccgcctgtgaaataccaacctgaagacacggttcattcaggcaacgcacaaaacagaaaatgaaggtggaacaagcacagatgttcttcaactgtttttgtctacactctttctcttttcctctaccatgctgaaggctgaaagacaggaagatggtgccatcagcaaatattattcggc

SEQ ID NO: 81 - DNA, 434 bp, Homo sapiens
  misc_feature: Incyte ID No: 1074183.1
  unsure 2: a, t, c, g, or other
gnggaacaggtggagttctccttcccactcgcctttacagttgaaaagctgacgggcagtggcgagctgtggtggcaggcggagagggcttcctcctccaagtcttggatcacctttgacctgaagaacaaggaagtgtctgtaaaacgggttacccaggaccctaagctccagatgggcaagaagctcccgctccacctcaccctgccccaggccttgcctcagtatgctggctctagaaacctcaccctggcccttgaagcgaaaacaggaaagttgcatcaggaagtgaacctggtggtgatgagagccactcagctccagaaaaatttgacctgtgaggtgtggggacccacctcccctaagctgatgctgagtttgaaactggagaacaaggaggcaaaggtctcgaagcgggagaaggcggtgtgggt

SEQ ID NO: 82 - DNA, 1320 bp, Homo sapiens
  misc_feature: Incyte ID No: 1352667CB1
cccaggcggtaggaacccactccggcccgctagacctgctgctatgtcccggccgcagcttcgacgctggcttctcgtctctagcccgccgagcggcgtcccgggtctagcgctgctggcgctgctggcgctgctggcgctgcggctcgcggccgggaccgactgcccatgcccggagcctgagctttgccgcccgattcgccaccatccagatttcgaggtctttgtgtttgatgttggacagaaaacttggaaatcttatgattggtcacagattacaactgtggcaacatttggaaaatatgactcagaacttatgtgctacgctcattcaaaaggagccagagtagtacttaaaggagatgtatccttaaaggatatcattgatcctgctttcagagcatcctggatagctcaaaaacttaatttggccaaaacacaatatatggatggaattaatatagatatagagcaagaagttaattgtttatcacctgaatatgatgcattaactgctttagtcaaagaaactacagactctttccatcgtgaaattgagggatcacaggtaacctttgatgtagcttggtctccaaagaacatagacagaagatgctataattatactggaatcgcagatgcttgtgacttcctctttgtgatgtcttatgatgaacaaagtcagatctggtcagaatgtattgcagcagccaatgctccctataatcagacattaactggatataatgactacatcaagatgagcattaatcctaagaaacttgtaatgggtgttccttggtatggttatgattatacctgcctgaatctgtctgaggatcatgtttgtaccattgcaaaagtccctttccggggggctccttgtagtgacgctgcaggacgtcaggtgccctacaaaacgatcatgaagcaaataaatagttctatttctggaaacctatgggataaagatcagcgggctccttattataactataaagatcctgctggccactttcatcaagtatggtatgataaccctcagagtatttctttaaaggcaacatatatacaaaactatcgcttacggggcattggcatgtggaatgcaaactgtcttgactactctggagatgctgtagccaaacagcaaactgaagaaatgtgggaagtcttaaagccaaagctgttacagagatgaacatcttttgtcaaaccattaagagttagaaagatgatctgtatcaacagatctagtttcttgcatttttattatgttgctatatacttttgttatccgtatactaaaaaaaaaaaaaa

SEQ ID NO: 83 - DNA, 1908 bp, Homo sapiens
  misc_feature: Incyte ID No: 705483CB1
gcgagctgcccaacgggcagcagctggcgcaagtagcctagctggagaggctcaccccaggaaggagggaggccaccgacctactgggccgacggactcccacacagttcctgagctggtgccaggcaggtgacacctcctgcagcccccagcatgcgggcaggcccaggccccaccgttacattggccctggtgctggcggtgtcatgggccatggagctcaagcccacagcaccacccatcttcactggccggccctttgtggtagcgtgggacgtgcccacacaggactgtggcccacgcctcaaggtgccactggacctgaatgcctttgatgtgcaggcctcacctaatgagggttttgtgaaccagaatattaccatcttctaccgcgaccgtctaggcctgtatccacgcttcgattctgccggaaggtctgtgcatggtggtgtgccacagaatgtcagcctttgggcacaccggaagatgctgcagaaacgtgtggagcactacattcggacacaggagtctgcggggctggcggtcatcgactgggaggactggcgacctgtgtgggtgcgcaactggcaggacaaagatgtgtatcgccggttatcacgccagctagtggccagtcgtcaccctgactggcctccagaccgcatagtcaaacaggcacaatatgagtttgagttcgcagcacagcagttcatgctggagacactgcgttatgtcaaggcagtgcggccccggcacctctggggcttctacctctttcctgactgctacaatcatgattatgtgcagaactgggagagctacacaggccgctgccctgatgttgaggtggcccgcaatgaccagctggcctggctgtgggctgagagcacggccctcttcccgtctgtctacctggacgagacacttgcttcctcccgccatggccgcaactttgtgagcttccgtgttcaggaggcccttcgtgtggctcgcacccaccatgccaaccatgcactcccagtctacgtcttcacacgacccacctacagccgcaggctcacggggcttagtgagatggacctcatctctaccattggcgagagtgcggccctgggcgcagctggtgtcatcctctggggtgacgcggggtacaccacaagcacggagacctgccagtacctcaaagattacctgacacggctgctggtcccctacgtggtcaatgtgtcctgggccacccaatattgcagccgggcccagtgccatggccatgggcgctgtgtgcgccgcaaccccagtgccagtaccttcctgcatctcagcaccaacagtttccgcctagtgcctggccatgcacctggtgaaccccagctgcgacctgtgggggagctcagttgggccgacattgaccacctgcagacacacttccgctgccagtgctacttgggctggagtggtgagcaatgccagtgggaccataggcaggcagctggaggtgccagcgaggcctgggctgggtcccacctcaccagtctgctggctctggcagccctggcctttacctggaccttgtaggggtctcctgcctagctgcctagcaagctggcctctaccacaagggctctcttaggcatgtaggaccctgcagggggtggacaaactggagtctggagtgggcagagcccccaggaagcccaggagggcatccataccagctcgcacccccctgttctaagggggaggggaagtccctgggaggccccttctctccctgccagaggggaaggagggtacagctgggctggggaggacctgaccctactcccttgccctagatagtttattattattattattttggggtctcttttgtaaattaaacataaaacaattgctaaaaaaaaaaaa

SEQ ID NO: 84 - DNA, 1208 bp, Homo sapiens
  misc_feature: Incyte ID No: 1327351.24
  unsure 87, 110, 146: a, t, c, g, or other
caggtctgtccccaagcatacgatggccaaaacttctgcaccagagcagcatcctgtgtaacacagtcaggtccagcagttaggganaactgcccactcagagtagatantatctggaaggaatgactgtttgggaaaagttccantgctagttcagtgccaacccttccccaccttctccagctctctcccactggttcctcccctctcaactgctctggttcttataaaaacctcacagccttccactaacatcccgtaggagcctctctccctactgctgctacacaagaccctgagactgacctgcaggacgaaaccatgaagagcctgatccttcttgccatcctggccgccttagcggtagtaactttgtgttatgaatcacatgaaagcatggaatcttatgaacttaatcccttcattaacaggagaaatgcaaataccttcatatcccctcagcagagatggagagctaaagtccaagagaggatccgagaacgctctaagcctgtccacgagctcaatagggaagcctgtgatgactacagactttgcgaacgctacgccatggtttatggatacaatgctgcctataatcgctacttcaggaagcgccgaggggccaaatgagactgagggaagaaaaaaaatctctttttttctggaggctggcacctgattttgtatccccctgtagcagcattactgaaatacataggcttatatacaatgcttctttcctgtatattctcttgtctggctgcacccctttttcccgcccccagattgataagtaatgaaagtgcactgcagtgagggtcaaaggagagtcaacatatgtgattgttccataataaacttctggtgtgatactttcatcttgtaaatctgctttcttttgggaagatattgagatatttaaatcatggcccaccttacccaaaataggagattctgttcatctcatatctagtattaattagaaaaataactacataaaaagaaggaagctaagaaggcactcactcagccataaattctctaaaccctctctaccttggaatccgtgaatggaatctggtatgttttttgcaggattttcctattgtaaattgtggcaaatacagggctcccttcatttgcttttcatctcttatgcatcaaagtcaaaaacatttctgtatcaagataatctagaagagaaa

SEQ ID NO: 85 - DNA, 720 bp, Homo sapiens
  misc_feature: Incyte ID No: 3147519CB1
ccgggactccaacatgcaatgattgccccagatctctgtactacacctgaccactttctgaaatatttgaagccgaggatacaggaagttcttaaaggagcctctctccctactgctgctacacaagaccctgagactgacctgcaggacgaaaccatgaagagcctgatccttcttgccatcctggccgccttagcggtagtaactttgtgttatgaatcacatgaaagcatggaatcttatgaacttaatcccttcattaacaggagaaatgcaaataccttcatatcccctcagcagagatggagagctaaagtccaagagaggatccgagaacgctctaagcctgtccacgagctcaatagggaagcctgtgatgactacagactttgcgaacgctacgccatggtttatggatacaatgctgcctataatcgctacttcaggaagcgccgagggaccaaatgagactgagggaagaaaaaaaatctctttttttctggaggctggcacctgattttgtatccccctgtagcagcattactgaaatacataggcttatatacaatgcttctttcctgtatattctcttgtctggctgcacccctttttcccgcccccagattgataagtaatgaaagtgcactgcagtgagggtcaaaggagagtcaacatatgtgattgttccataataaacttctggtgtgatactttcaaaaa

SEQ ID NO: 86 - DNA, 4024 bp, Homo sapiens
  misc_feature: Incyte ID No: 1273213CB1
cccgggtatcaaaagaaggatcggctccgcccccgggctccccgggggagttgatagaagggtccttcccaccctttgccgtccccactcctgtgcctacgacccaggagcgtgtcagccaaagcatggagaatcaagagaaggcgagtatcgcgggccacatgttcgacgtagtcgtgatcggaggtggcatttcaggactatctgctgccaaactcttgactgaatatggcgttagtgttttggttttagaagctcgggacagggttggaggaagaacatatactataaggaatgagcatgttgattacgtagatgttggtggagcttatgtgggaccaacccaaaacagaatcttacgcttgtctaaggagctgggcatagagacttacaaagtgaatgtcagtgagcgtctcgttcaatatgtcaaggggaaaacatatccatttcggggcgcctttccaccagtatggaatcccattgcatatttggattacaataatctgtggcggacaatagataacatggggaaggagattccaactgatgcaccctgggaggctcaacatgctgacaaatgggacaaaatgaccatgaaagagctcattgacaaaatctgctggacaaagactgctaggcggtttgcttatctttttgtgaatatcaatgtgacctctgagcctcacgaagttcttgccctgtggttcttgtggtatgtgaagcagtgcgggggcaccactcggatattctctgtcaccaatggtggccaggaacggaagtttgtaggtggatctggtcaagtgagcgaacggataatggacctcctcggagaccaagtgaagctgaaccatcctgtcactcacgttgaccagtcaagtgacaacatcatcatagagacgctgaaccatgaacattatgagtgcaaatacgtaattaatgcgatccctccgaccttgactgccaagattcacttcagaccagagcttccagcagagagaaaccagttaattcagcgtcttccaatgggagctgtcattaagtgcatgatgtattacaaggaggccttctggaagaagaaggattactgtggctgcatgatcattgaagatgaagatgctccaatttcaataaccttggatgacaccaagccagatgggtcactgcctgccatcatgggcttcattcttgcccggaaagctgatcgacttgctaagctacataaggaaataaggaagaagaaaatctgtgagctctatgccaaagtgctgggatcccaagaagctttacatccagtgcattatgaagagaagaactggtgtgaggagcagtactctgggggctgctacacggcctacttccctcctgggatcatgactcaatatggaagggtgattcgtcaacccgtgggcaggattttctttgcgggcacagagactgccacaaagtggagcggctacatggaaggggcagttgaggctggagaacgagcagctagggaggtcttaaatggtctcgggaaggtgaccgagaaagacatctgggtacaagaacctgaatcaaaggacgttccagcggtagaaatcacccacaccttctgggaaaggaacctgccctctgtttctggcctgctgaagatcattggattttccacatcagtaactgccctggggtttgtgctgtacaaatacaagctcctgccacggtcttgaagttctgttcttatgctctctgctcactggttttcaataccaccaagaggaaaatattgacaagtttaaaggctgtgtcattgggccatgtttaagtgtactggatttaactacctttggcttaattccaatcattgttaaagtaaaaacaattcaaagaatcacctaattaatttcagtaagatcaagctccatcttatttgtcagtgtagatcaactcatgttaattgatagaataaagccttgtgatcactttctgaaattcacaaagttaaacgtgatgtgctcatcagaaacaatttctgtgtcctgtttttattcccttcaatgcaaaatacatgatgatttcagaaacaaagcatttgactttctgtctgtggaggtggagtaggtgaaggcccagcctgtaactgtcctttttcttcccttaggcaatggtgaactgtcattacagagcctagaggctcacagcctcctggaggaagcagcctccactttggatcaggaaatagtaaaggaaagcagtgttgggggtagcggcatgcagaccctcagaccagaatggggacatcttgtggtctgctgcctcaggaatctcctgaccacttgtagtccctccgacttctctagacatctagtctcagtgctagcttatttgtatttttcctctttcacttcttatggaggagagtgtttaactgagttagaatgttgaaactgacttgctgtgacttatgtgcagctttccagttgagcagaggaaaatagtggcaggactgtcccccaggaggactccctgcttagctctgtgggagaccaactacgactggcatcttctcttccccctggaaggcagctagacaccaatggatccttgtcagttgtaacattctatttcaacttcaggaaagcagcagttttcttttaatttttcctatgaccataaaattagacatacctctcaacttacatatgtcttcaacatggttacctctgcataaatattagcaaagcatgccaatttctcttaagtactgaaatacatatgataaatttgactgttatttgttgagactatcaaacagaaaagaaattagggctctaatttccttaaagcaagctcacttgctttagttgttaagttttataaaagacatgaaattgagtcattttatatatgaaaactaagttctctatcttaggagtaatgtcggcccacaagggtgcccacctcttgttttccccttttaaaaactcagatttttaaaagccctttccaaaggtttcaactgtaaaatacttctttttacaatgtatcaacatatttttatttaaggggaattaacaattgccagggaaaccagccaacccaagtttattatatcattaaccttatcataaattcaaacctaagttgctggaccctggtgtgaggacataaatcttccaaagttttgcctatcctaagagctgcatttttctactgctctttaccttgcattttagctaatttaggagttttgagaatgtattggatacgctccagtacataaggagttgccgcatattatatcagactgctttgagaaatctcatccctagtctattgcagttgtttctattagcttactgattaactcagtcctgacacaccttttgggaaatgctgatttaaacttcttaactggcaacagttggaacagtaatcagtttgctaacatatttaaagtcttgaatgttgaagaactcatgtgatttacccttttcaactttttggaaaacgatttaatttattctaattagattaaccctattaatctatggattgggtatcaaaatgaatgccagtccagatgtgcctagacacgaaattggagctgaggactctcacgatatgcaagttcatccaacgtgaagataccataagctttttctctgaaccagagaaatgaaagtcagtttaagaggctgatagatcttggccctgttaaggcatccacttcacagttctgaaggctgagtcagccccactccacagttaggccaagaattagattttaaaacttcatctgtctgtcccagttaactgttaaataaggcctcatcctccactgaagagtatggattgaaggattgtgaactatgtttagtgtgattgtgaacttggtgcctaatgttccatgtctgaagtttgccccagtgctacacgttggagtatacctatgtgtgtgctttgccactgaagtaagattttgcctgtatggtactgttttgtttgttaataaagtgcactgccacccccaatgcaaaaaaaa

SEQ ID NO: 87 - DNA, 342 bp, Homo sapiens
  misc_feature: Incyte ID No: 363462.6
gtgctgtacaaatacaagctcctgccacggtcttgaagttctgttcttatgctctctgctcactggttttcaataccaccaagaggaaaatattgacaagtttaaaggctgtgtcattgggccatgtttaagtgtactggatttaactacctttggcttaattccaatcattgttaaagtaaaaacaattcaaagaatcacctaattaatttcagtaagatcaagctccatcttatttgtcagtgtagatcaactcatgttaattgatagaataaagccttgtgatcactttctgatgagcacatcacgtttaactttgtgaatttcaggttctagatcgca

SEQ ID NO: 88 - DNA, 2338 bp, Homo sapiens
  misc_feature: Incyte ID No: 815856CB1
aggggaggttctccttttgctattgtcatcacccagcaacaccagattcaccgctcctgcacagtcaacatcatgtttggaaccccgcaagagcatcgcaacatgccccaagcagatgccatggtgctggtggccagaaattatgagcgttacaagaatgagtgccgggagaaggaacgtgaggagattgccagacaggcagccaagatggccgatgaagccatcctgcaggaaagagagagaggaggccctgaggagggagtgcgtgggggccaccctccagccatccagagcctcatcaacctgctggcagacaacaggtacctcactgctgaagagactgacaagatcatcaactacctgcgagagcggaaggagcggctgatgaggagcagcaccgactctctgcctggtgagctacgtggcagggccgaggcccgatttcccgccaaccactcggggcgacctcgggtgcctcgctgaagacacagccaagctcccaaccgctccagagcggccaagtgctcccctctgctacacccactccatctgcaccccccacctcccagcaagagcttcaggccaaaatcctcagcctcttcaatagtggcacagtgacggccaatagcagctctgcatccccctcggttgctgccggaaacaccccaaaccagaatttttccacagcagcaaacagccagcctcaacaaagatcacaggcttctggcaatcagcctccaagcattttgggacagggaggatctgctcagaacatgggccccagacctggggctccttcccaagggctttttggccagccttccagtcgcctggcacctgctagcaacatgactagccagaggcctgtgtcttccacaggtatcaactttgacaatccaagtgtacagaaggctctggataccctgatccagagtggccctgctctctcccacctggttagccagaccacagcacagatggggcagccacaggcccccatgggatcttaccagaggcattactgaagctaaatctttcaactctccccagtcccctcatcccctggcctcctcccacttacttgttctaaatagagctgtttggaggatgttctctgcgctcccaggccggcatcgagtgtcatcaatttctaccacctgctctctcttctgcccaaggctgtgttgcttattccttacaaagtttatactgcatttggggctgtatctttttttgttttttgttttgtagaaaataaatatctccgggggcagtacaggtgtctgggcttgtatttgatggggtttctccggtccctgtttctactggatttggagccaggcccagctagccaagtttggaatggcatttgtcatgtcagtagccaccacctttgttcattgtgaacctaccaaggctttccagcttcatacacattgaccagagctcaagctcctgcctgcaactcctgcctagagttgaagaaaagcaaactggccttggcaggcacagtgtcatcataccctcaccccatatgtttggggtctgcttgaggattcataaatcagccactctggattgttgaggaatggccatggcagccacagaaaaaagaatttttctctctgagccaaggttgttttttgtttttttctcttttcttttttgttttcatttcattggaagatctccaatggactgaacagctccagtcagcagcagttaccacaaactgtgaatctgggccccaccactcttccctgttaaccagttctgtcagcatccccctctccagcagcacttccatgaagttggttctgagactctggccgtgaacacccgtttcttcagtgatttgttttgggcttttggctcaaaaccccaggctcttgtttttgtctagactcttattctgtttcctgagcagcaggaggtagggaccactttgatgtcagacttctggtagctggacatgttctcgagatgggtggctgttcgcgacttttgtaccagagtgaaattgttagaaggagggtttctggctgtggttctaaatggagccccaggaagctgccctctccccagggtttgtgctcagtagagccctgtggatcacagtcttgaggtcctctagcaggggtgagggagagcagcgacttcagctgagtccctgccagtggttaagcaaacaatggtttcaaaattcaaggtccccaaatggcagcattttatgttctgacctgtttgtgttatatagtggttttttttttcctctttggaactcttgtgttgttaataaaatgaaatgattactttttaattaaaatgaaaaaaaaaa

SEQ ID NO: 89 - DNA, 4978 bp, Homo sapiens
  misc_feature: Incyte ID No: 232935.19
ccggcgtggtggaaggacacagtgaggttctcacccccgccccccgactcctcgctcccatcccagttccatcaaaacgaacccgggccagcgcaaggatctccgagttgcgagtgtgctgaggctgggactgtcactcattctccgatcagcgcgtgaacgcagctcggctgccggctggcaggaaacaattctgcaaaaataatcatactcagcctggcaattgtctgcccctaggtctgtcgctcagccgccgtccacactcgctgcaggggggggggcacagaatttaccgcggcaagaacatccctcccagccagcagattacaatgctgcaaactaaggatctcatctggactttgtttttcctgggaactgcagtttctctgcaggtggatattgttcccagccagggggagatcagcgttggagagtccaaattcttcttatgccaagtggcaggagatgccaaagataaagacatctcctggttctcccccaatggagaaaagctcaccccaaaccagcagcggatctcagtggtgtggaatgatgattcctcctccaccctcaccatctataacgccaacatcgacgacgccggcatttacaagtgtgtggttacaggcgaggatggcagtgagtcagaggccaccgtcaacgtgaagatctttcagaagctcatgttcaagaatgcgccaaccccacaggagttccgggagggggaagatgccgtgattgtgtgtgatgtggtcagctccctcccaccaaccatcatctggaaacacaaaggccgagatgtcatcctgaaaaaagatgtccgattcatagtcctgtccaacaactacctgcagatccggggcatcaagaaaacagatgagggcacttatcgctgtgagggcagaatcctggcacggggggagatcaacttcaaggacattcaggtcattgtgaatgtgccacctaccatccaggccaggcagaatattgtgaatgccaccgccaacctcggccagtccgtcaccctggtgtgcgatgccgaaggcttcccagagcccaccatgagctggacaaaggatggggaacagatagagcaagaggaagacgatgagaagtacatcttcagcgacgatagttcccagctgaccatcaaaaaggtggataagaacgacgaggctgagtacatctgcattgctgagaacaaggctggcgagcaggatgcgaccatccacctcaaagtctttgcaaaacccaaaatcacatatgtagagaaccagactgccatggaattagaggagcaggtcactcttacctgtgaagcctccggagaccccattccctccatcacctggaggacttctacccggaacatcagcagcgaagaaaaggcttcgtggaacatcagcagcgaagaaaagactctggatgggcacatggtggtgcgtagccatgcccgtgtgtcgtcgctgaccctgaagagcatccagtacactgatgccggagagtacatctgcaccgccagcaacaccatcggccaggactcccagtccatgtaccttgaagtgcaatatgccccaaagctacagggccctgtggctgtgtacacttgggaggggaaccaggtgaacatcacctgcgaggtatttgcctatcccagttgccacgatctcatggtttcgggatggccagctgctgccaagctccaattacagcaatatcaagatctacaacaccccctctgccagctatctggaggtgaccccagactctgagaatgattttgggaactacaactgtactgcagtgaaccgcattgggcaggagtccttggaattcatccttgttcaagcagacaccccctcttcaccatccatcgaccaggtggagccatactccagcacagcccaggtgcagtttgatgaaccagaggccacaggtggggtgcccatcctcaaatacaaagctgagtggagagcagttggtgaagaagtatggcattccaagtggtatgatgccaaggaagccagcatggagggcatcgtcaccatcgtgggcctgaagcccgaaacaacgtacgccgtaaggctggcggcgctcaatggcaaagggctgggtgagatcagcgcggcctccgagttcaagacgcagccagtccatagccctcctccaccggcatctgctagctcgtctacccctgttccattgtctccaccagatacaacttggcctcttcctgcccttgcaaccacagaaccagctaaaggggaacccagtgcacctaagctcgaagggcagatgggagaggatggaaactctattaaagtgaacctgatcaagcaggatgacggcggctcccccatcagacactatctggtcaggtaccgagcgctctcctccgagtggaaaccagagatcaggctcccgtctggcagtgaccacgtcatgctgaagtccctggactggaatgctgagtatgaggtctacgtggtggctgagaaccagcaaggaaaatccaaggcggctcattttgtgttcaggacctcggcccagcccacagccatcccagcaaccttgggaggcaattctgcatcctacacctttgtctcattgcttttctctgcagtgactcttcttttgctctgttaggaacttgaacacaaaaattaaatttgcttaaaagcccagttcctatgaaaaagatcagtgccccctttggaagaacctggcaggaccaccatggccacagctgctgagcaaccattctgtgtggaagagaaggttttgtgattggaaaaagctttacctccagacatgtcaccactcacagatacttttgtgccacttcataaggagtttgccccctttttaatggcagtaaaaagaatttgagagctctttctttaaatgctatttttaaaaaccatcatgctagatttacagagaagtttctgcatatctgctacttgttgcattttgggttcaaacctaaatatgatgtagcagaggaagaattctaagtaccttctaaagcttgtgtcagattgttaaaatcaccacacattcccctcattctaactctgtgctccttgtcctcccttcaataataattggctttgcttgcaattaagcatttaagtgcccatgttaaaagagccagaccgcactgattcacatgagcgttttgctgacatgatgggcaactgaagtcacccctgttgcccatgcactggaaaaaaagttgaatttgttggatattttctggggctgatgaacgttctgggatgtgctttcagtcctcgtattacggccagcaccttacactgtctctgtgaacggggccaagccatgatgtgccaacaagtgtcagctttgaaaggtgtttgtctcccaatcggggtgactcccctgctgcctggcagcatgtcgcagatcagcacagagtggggccgtggttcagcagtgacccacagaatggctttgagcatcagtctacaggacaggttggaagcatccactgtgaaccaggcattagtcccctacctggcctgtgtgtgctcagtagagaaggagagggacaggccactcccagactgcccagcccaggagggttaataaattggggccgagccaacctgtcagtgcttcctgaatgccccagcctctgtattggtgcgttggttcagtgacattttctaaactctcctgaaaatccagctgctcctccctgctgcttgggagttcacccaggagaggaaatgggtgtgttttgttaaggtcccttgtggagactcagggctgaatcctgcttggtaatatcagtgtgtgtgcttggggatggaccttctactgaataaaaactccctccctccccccattgtggtcacatatcattctacatatctcatctctgagcatctccatggaagcttgatttttgttctttttggtttctttatgtatttttttctgttgttattattttttaatgttcaaagactagccttcccctttgggattccaaatgatcccatgctgtggtctgaggggcaaagccacctatgttggcgctcgccattaatccccagcgctcagtttagaggctcacgtgcagacatcagaggctccatgctgcacagtagctcaggcagggtagtgcctctcaacccagccacaaaactctccccgctggagtcccagatggcgcttcacaccagggcagtggaggcaggcatggtttttgggcacagggcagagcataaggatcccaggtcagtgtgggagagctactggctcttaggatcaccttgggcagaagtcacacggcttcatcctaggagggcccagcttgggagtctgcctccccctgatcccaggaccacccacaggagaggggcagtgtccatctttctgaagggaccctttggagatctcgtcctaagtgtggagaggactgacgtggccctgtcatctcaacacatcccagggtcaggcaggcctcagctgaaacaatgtcagggtcctcaagggtcccatttagacagacccacggcttgtaacagtgcgctcctcaggaggcagcactagcgcatacccactccccacggacactgagttcctggtgacagctgcagccccagccccgccaggagtcctggagacagcagccctcagagaccctgcaggagtgagtgcaccccaccttgctcagccacaccccactcccctgtgccctgtagttgtgctgcccatgctccacacaccatggggcccctttgctcatttttggactatttatacagcaggtttggatcatgtttttctactaataagaatgctaacattgttgtgtagataatcagtgagggctttatgaagtttacacctttgcattattaaaggaaataacagttcatgtgaactcaccagcgtggcttgattttattcaatagttgtgtctgacaaagcagcaaagaccctt

SEQ ID NO: 90 - DNA, 5988 bp, Homo sapiens
  misc_feature: Incyte ID No: 1382932.11
ccggccccgggacgcgagggggctgccaggggcgtccggttacatccccgccttcctctgtcctggccgcgggaccgggtttgcgggaccgcagttcgggaacatgttggcctcgagcagccggatccgggctgcgtggacgcgggcgctgctgctgccgctgctgctggcggggcctgtgggctgcctgagccgccaggagctctttcccttcggccccggacagggggacctggagctggaggacggggatgacttcgtctctcctgccctggagctgagtggggcgctccgcttctacgacagatccgacatcgacgcagtctacgtcaccacaaatggcatcattgctacgagtgaacccccggccaaagaatcccatcccgggctcttcccaccaacattcggtgcagtcgcccctttcctggcggacttggacacgaccgatggcctggggaaggtttattatcgagaagacttatccccctccatcactcagcgagcagcagagtgtgtccacagagggttcccggagatctctttccagcctagtagcgcggtggttgtcacttgggaatccgtggccccctaccaagggcccagcagggacccagaccagaaaggcaagagaaacacgttccaggctgttctagcctcctctgattccagctcctatgccattttcctttatcctgaggatggtctgcagttccatacgacattctcaaagaaggaaaacaaccaagttcctgccgtggttgcattcagtcaaggttcagtgggattcttatggaagagcaacggagcttataacatatttgctaatgacagggaatcaattgaaaatttggccaagagtagtaactctgggcagcagggtgtctgggtgtttgagattgggagtccagccaccaccaatggcgtggtgcctgcagacgtgatcctcggaactgaagatggggcagagtatgatgatgaggatgaagattatgacctggcgaccactcgtctgggcctggaggatgtgggcaccacgcccttctcctacaaggctctgagaaggggaggtgctgacacatacagtgtgcccagcgtcctctccccgcgccgggcagctaccgaaaggccccttggacctcccacagagagaaccaggtctttccagttggcagtggagacttttcaccagcagcaccctcaggtcatagatgtggatgaagttgaggaaacaggagttgttttcagctataacacggattcccgccagacgtgtgctaacaacagacaccagtgctcggtgcacgcagagtgcagggactacgccacgggcttctgctgcagctgtgtcgctggctatacgggcaatggcaggcaatgtgttgcagaaggttccccccagcgagtcaatggcaaggtgaaaggaaggatctttgtggggagcagccaggtccccattgtctttgagaacactgacctccactcttacgtagtaatgaaccacgggcgctcctacacagccatcagcaccattcccgagaccgttggatattctctgcttccactggccccagttggaggcatcattggatggatgtttgcagtggagcaggacggattcaagaatgggttcagcatcaccgggggtgagttcactcgccaggctgaggtgaccttcgtggggcacccgggcaatctggtcattaagcagcggttcagcggcatcgatgagcatgggcacctgaccatcgacacggagctggagggccgcgtgccgcagattccgttcggctcctccgtgcacattgagccctacacggagctgtaccactactccacctcagtgatcacttcctcctccacccgggagtacacggtgactgagcccgagcgagatggggcatctccttcacgcatctacacttaccagtggcgccagaccatcaccttccaggaatgcgtccacgatgactcccggccagccctgcccagcacccagcagctctcggtggacagcgtgttcgtcctgtacaaccaggaggagaagatcttgcgctatgctctcagcaactccattgggcctgtgagggaaggctcccctgatgctcttcagaatccctgctacatcggcactcatgggtgtgacaccaacgcggcctgtcgccctggtcccaggacacagttcacctgcgagtgctccatcggcttccgaggagacgggcgaacctgctatgatattgatgaatgttcagaacaaccctcagtgtgtgggagccacacaatctgcaataatcacccaggaaccttccgctgcgagtgtgtggagggctaccagttttcagatgagggaacgtgtgtggctgtcgtggaccagcgccccatcaactactgtgaaactggccttcataactgcgacataccccagcgggcccagtgtatctacacaggaggctcctcctacacctgttcctgcttgccaggcttttctggggatggccaagcctgccaagatgtagatgaatgccagccaagccgatgtcaccctgacgccttctgctacaacactccaggctctttcacgtgccagtgcaaacctggttatcagggagacggcttccgttgcgtgcccggagaggtggagaaaacccggtgccagcacgagcgagaacacattctcggggcagcgggggcgacagacccacagcgacccattcctccggggctgttcgttcctgagtgcgatgcgcacgggcactacgcgcccacccagtgccacggcagcaccggctactgctggtgcgtggatcgcgacggccgcgaggtggagggcaccaggaccaggcccgggatgacgcccccgtgtctgagtacagtggctcccccgattcaccaaggacctgcggtgcctaccgccgtgatccccttgcctcctgggacccatttactctttgcccagactgggaagattgagcgcctgcccctggagggaaataccatgaggaagacagaagcaaaggcgttccttcatgtcccggctaaagtcatcattggactggcctttgactgcgtggacaagatggtttactggacggacatcactgagccttccattgggagagctagtctacatggtggagagccaaccaccatcattagacaagatcttggaagtccagaaggtatcgctgttgatcaccttggccgcaacatcttctggacagactctaacctggatcgaatagaagtggcgaagctggacggcacgcagcgccgggtgctctttgagactgacttggtgaatcccagaggcattgtaacggattccgtgagagggaacctttactggacagactggaacagagataaccccaagattgaaacttcctacatggacggcacgaaccggaggatccttgtgcaggatgacctgggcttgcccaatggactgaccttcgatgcgttctcatctcagctctgctgggtggatgcaggcaccaatcgggcggaatgcctgaaccccagtcagcccagcagacgcaaggctctcgaagggctccagtatccttttgctgtgacgagctacgggaagaatctgtatttcacagactggaagatgaattccgtggttgctctcgatcttgcaatttccaaggagacggatgctttccaaccccacaagcagacccggctgtatggcatcaccacggccctgtctcagtgtccgcaaggccataactactgctcagtgaacaatggcggctgcacccacctatgcttggccaccccagggagcaggacctgccgttgccctgacaacaccttgggagttgactgtatcgaacagaaatgaagacaagagtgccttatttcctttccaagtatttcacagcaacactctacttgaagcaacttggtccagattgaaaagtgtcctctggctgagtggccactaggcccagacccagcccagcctgagccccaacaacaacttttccctcactgttccccaaaacatgcaccctggacttctctaatagaaaagttccacccctacacaaggacagaaccctccacccctacccccaaccctcagacagacttatacacccctgagtgaggattacatgcccatcccagtgtcctaggaccttttcccaatactagccccccagtggtgaacagaacctcccaaatttgagttgcacccttccctgtggccttatgagctcagcctcgctttgaggtacccaccgtcctgtcagctccttgacctatgagccggggcctgactaggaaaagttgggagttaaggaggaaattagcattccttaatgttttgttttggtgctctgaatttcttctttattatagtcctatagttttactcctcagttcctcaccatcatcatcttgtctaagacccccattataatattcatgcgctgctttttcatcaaaacctaccctgtcctagagatctatgggcatttggtggatgataatgagcagcccctcccagatagaatgtcaatatttgagcagtaggatattggcatttgttagttaaaggcttaaatcaaaagaatgtccaatggtaggaatttcaaggtgtaggtcagatatttgagaataggggatttttttgatgtgccttaaattataccaaagattactaattattcctctttgcccaaaatacttgcatccaaggttctagtctctgttgctgtgctggtctttagccccactgcttgcactgatgtccctccttttcacggagacctatctgaggtacaggatggggctggcaccagatgatgtcccaccacagtccctcacctccggcctccacatgacagaaccaatttacactcaaccatgacctcacccctccttggtttctccctcgatctgtggccctttttggatgtattcttatctaacaacacaatccggaaagactgaattgaatatttatactaatggttcatatcctttattgctcaatgatctaattaaagggatcattgccacatttcatgtttatatttctacaatttgtttagaaaacatctcctgaccatatcagtagctcgtgttatctttttatcaactgcttcccagagtcctaaaacaatagaaattttggattgaaaagttcagcataaggagtttgagtcagtaaaggatgggataaaggagtcgagatgattcaatgaaaagtatcacaaaaaagagattgatcaacaagagaaataaaaaagcccaagaggaagtggtaggggaaggaatttaagaacagcaataagtaaaactcttaagtaactccaaaaagaaaatggtacattttgccaaagaccacttatacttgagaacatggaagaatttgcctgatactctctttggggaaaagagtctctcctcttttcctcaaaccccagtacactcagcctctctgccccaccttctcctgactttgtcctcacttgcttctgcagtacattggaacctgaattgaaagaaagtcttccttgaataattggagtttgtcttgagaggcaaatatagccccaagaatcacaagattcgaggaccatgtaggtcttttacgtagcccaaatccataaattagtctcactttttgtatttatcgtttcatattaaaccctctatatcaaatgttcatcatgattttgtatgatttttataactattttattcattttattagatttattctaaaattttttaatggtaaattcttaaactgtggaaaccactgaaggtgcttattaactgttctcccagatttgtacaagtattggatgattccttgagtttacagctgtacaaatagtgtgggcagaacccagggcatgaagatccaaaagggcctggttcagctttttctccagggccatggcagctttcatggcgtctggggttttaccccactcatcttcagctggcttcttgatgtcctggaagaga

SEQ ID NO: 91 - DNA, 1538 bp, Homo sapiens
  misc_feature: Incyte ID No: 416842.29
ctgcaccaagctggccctgcacggctgcaagggaggctcctgtggacaggccaggcaggtgggcctcaggaggtgcctccaggcggccagtgggcctgaggccccagcaagggctagggtccatctccagtcccaggacacagcagcggccaccatggccacgcctgggctccagcagcatcagcagcccccaggaccggggaggcacaggtggcccccaccacccggaggagcagctcctgcccctgtccgggggatgactgattctcctccgccaggccacccagaggagaaggccaccccgcctggaggcacaggccatgaggggctctcaggaggtgctgctgatgtggcttctggtgttggcagtgggcggcacagagcacgcctaccggcccggccgtagggtgtgtgctgtccgggctcacggggaccctgtctccgagtcgttcgtgcagcgtgtgtaccagcccttcctcaccacctgcgacgggcaccgggcctgcagcacctaccgaaccatctataggaccgcctaccgccgcagccctgggctggcccctgccaggcctcgctacgcgtgctgccccggctggaagaggaccagcgggcttcctggggcctgtggagcagcaatatgccagccgccatgccggaacggagggagctgtgtccagcctggccgctgccgctgccctgcaggatggcggggtgacacttgccagtcagatgtggatgaatgcagtgctaggaggggcggctgtccccagcgctgcgtcaacaccgccggcagttactggtgccagtgttgggaggggcacagcctgtctgcagacggtacactctgtgtgcccaagggagggccccccagggtggcccccaacccgacaggagtggacagtgcaatgaaggaagaagtgcagaggctgcagtccagggtggacctgctggaggagaagctgcagctggtgctggccccactgcacagcctggcctcgcaggcactggagcatgggctcccggaccccggcagcctcctggtgcactccttccagcagctcggccgcatcgactccctgagcgagcagatttccttcctggaggagcagctggggtcctgctcctgcaagaaagactcgtgactgcccagcgccccaggctggactgagcccctcacgccgccctgcagcccccatgcccctgcccaacatgctgggggtccagaagccacctcggggtgactgagcggaaggccaggcagggccttcctcctcttcctcctccccttcctcgggaggctccccagaccctggcatgggatgggctgggatcttctctgtgaatccacccctggctacccccaccctggctaccccaacggcatcccaaggccaggtgggccctcagctgagggaaggtacgagctccctgctggagcctgggacccatggcacaggccaggcagcccggaggctgggtggggcctcagtgggggctgctgcctgacccccagcacaataaaaatgaaacgtgaaaaa

SEQ ID NO: 92 - DNA, 733 bp, Homo sapiens
  misc_feature: Incyte ID No: 416842.32
  unsure 665, 690, 698: a, t, c, g, or other
cgcatcgaaaacgccgctgagacctcagccttgacctccctcagcgtggccgggaccctgagcctctgcgcagagccacccgccccgacgtacttaggcggcatagccctgagacctctggccagcgccaggagtggacagtgcaatgaaggaagaagtgcagaggctgcagtccagggtggacctgctggaggagaagctgcagctggtgctggccccactgcacagcctggcctcgcaggcactggagcatgggctcccggaccccggcagcctcctggtgcactccttccagcagctcggccgcatcgactccctgagcgagcagatttccttcctggaggagcagctggggtcctgctcctgcaagaaagactcgtgactgcccagcgccccaggctggactgagcccctcacgccgccctgcagcccccatgcccctgcccaacatgctgggggtccagaaaccacctcggggtgactgagcggaaggccaggcagggccttcctcctcttcctcctccccttcctcgggaggctccccagaccctggcatgggatgggctgggatcttctctgtgaatccacccctggctacccccaccctggctaccccaacggcatcccaaggccaggtgggccctcagctgagggaaggtacgagntccctgctggagcctgggacccatngcacaggncaggcagcccggaggctgggtggggcctcagtggg

SEQ ID NO: 93 - DNA, 1522 bp, Homo sapiens
  misc_feature: Incyte ID No: 3089495CB1
cgaagattttcttgggcatctcccggaaagtgcgttttaaggcgaagtcatgatgtattctcccatctgtctcactcaggatgaatttcacccattcatcgaggcacttcttccacatgtccgtgcaattgcctatacttggttcaacctgcaggctcgaaaacgcaagtactttaaaaagcatgagaagcgaatgtcaaaggatgaagaaagagcagtcaaagatgagcttctcagtgaaaagcctgaaatcaaacagaagtgggcatccaggctccttgccaaactgcgcaaagatattcgccaggagtatcgagaggactttgtgctcaccgtgactggcaagaagcacccgtgctgtgtcttatccaatcccgaccagaagggtaagattaggagaatcgactgcctgcgacaggcagacaaagtctggcgtctggatctagtcatggtgatcctgttcaaaggcatccccttggaaagtaccgatggagagcggctcatgaaatccccacattgcacaaacccagcactttgtgtccagccacatcatatcacagtatcagttaaggagcttgatttgtttttggcatactacgtgcaggagcaagattctggacaatcaggaagtccaagccacaatgatcctgccaagaatcctccaggttaccttgaggatagttttgtaaaatctggagtcttcaatgtatcagaacttgtaagagtatccagaacgcccataacccagggaactggagtcaacttcccaattggagaaatcccaagccaaccatactatcatgacatgaactcgggggtcaatcttcagaggtctctgtcttctccaccaagcagcaaaagacccaaaactatatccatagatgaaaatatggaaccaagtcctacaggagacttttacccctctccaagttcaccagctgctggaagtcgaacatggcacgaaagagatcaagatatgtcttctccgactactatgaagaagcctgaaaagccattgttcagctctgcatctccacaggattcttccccaagactgagcactttcccccagcaccaccatcccggaatacctggagttgcacacagtgtcatctcaactcgaactccacctccaccttcaccgttgccatttccaacacaagctatccttcctccagccccatcgagctacttttctcatccaacaatcagatatcctccccacctgaatcctcaggatactctgaagaactatgtaccttcttatgacccatccagtccacaaaccagccagtcctggtacctgggctagcttggttcctttccaagtgtcaaataggacacccatcttaccggccaatgtccaaaattacggtttgaacataattggagaacctttccttcaagcagaaacaagcaactgagggaaaaagaaacacaacaatagtttaagaaattttttttttaaataaaaaaaaaggaaaagaggaagactggacaaaacaacacaaaggcagatagg

SEQ ID NO: 94 - DNA, 5140 bp, Homo sapiens
  misc_feature: Incyte ID No: 1096533.1
gcagccggagaggaggcggtgcgtgcggtggcgctgcggagacccggtccagacgcctggcggccgccggcacacaaggcgctttctagctccctcccccgagcgcacagcccgcctccttccgcggcgcctgcagtggcacggattgctctgccctaccgtgacgcgctccggagacgctctgcgggtcctgggacaccgggtccggcggcgtggggacgacagacggagggcgaacgccatccggtagccggtccgcgagccatcgttcggggtcgcagtcctctccccggctggccctcctttctccggggcattcgccaccgctttccctggggctgagacgaccggttcgtcgcctccttgcccgtgaccgtcgctagaactcagttgtgcgttgcggccagtcgccacttgctgagtggaagcaaaagtgtcagtgcagtgtggcatgagaaaccggaaagtccaaggggcagcagcgggttcattaaaaatctatctgtttaaaaagtcctcctacgctgacagcgtcctcactcacctgaatctgtgtacgccagcagcgtctcttcactgacgtccttctccatgccggaaatagggaccttcccttgccaccgggcagtgctggctgcatgcagtcgctactttgaggccatgttcagtggtggcctgaaagagagccaggacagtaaggtcaactttgacaattccatccacccagaagtcttggagctgctgcgggactatgcgtactcctcccgggtcattcatcaattggaaggaaaatgcagaaattcgctcctgggaagcttggtgacatggctggagtttcaaggacatccggggatgcctgtgccggagttcctggaaaaagaaactggaattccaacaaatggctggtgcatgcttgctgcttgtctggatgcacaccagtgcacccaagctgtacgaactatcttggagaatgtgtctcagcaaacttccaaaccatcaggaaagaatgaagatttcctccagcttgccccatgtgacatttggtagttgcaacctccttgtcccagtgaagagctggagacagaggatgaaaggcttgtgtacgaagtctgcaattaacttggatcagctattgacctggaagaagcgctattggtacctcccagaactgttgcagacagtaaggctggcacttctgccagccatctatctcatggagaatgtggccatggaggaatctcatcaccaagcagagaaagagtaaggaaattgtggaagaggccatcaggtgcaaactgaaaatcctgcagaatgacggtgtggtaaccagcctctgtgcccgacctcggaaaactggcctggcccctctttctttctgggaggacagattttcatgtgtgacaagttggtatctggtagaccagaaggccaaagaaatcattcccaaggctgacattcccagcccaagaaaagagtttagtgcatgtgcgattggctgcaaagtgtacattactggggggcgggggtctgaaaatggggtctcgaaagatgtctgggtttatgataccctgcacgaggagtggtcacaaggctgcccccatgctggtggccaggtttggccatggctctgctgaactgaagcactgcctgtatgtggttggggggcacacggccgcaaactggctgccctcccggcctccccctcagtctctctaaaagcaggtagaacattatgaccccacaatcaacaaatggaccatggcggccccacgtccgagaaggcgttagcaactgcgcacaggtagtgagtgccaaacttaagttatatgctattcggaggtaccagtgtcagtcatgacaagctccccaaagttcagtgttacgatgcagtgtgaaaacaggtgggactggacccgggcaacttgttccccagccctggcgtatacacagccaagcaagctgtcctgggggaacccaggattttttattatggggggtgataccagaatttctctgcctgcttctgcttataaattcgcaacagtgagacttacccagtgggaccaaaggtgggagatagtgaccagccaagcgcattgagcttgccattgcttgtggccttctgtggaaacaaacttcatacgttggttggaggatacatttgggccaaattttcaaagccgaatgccaaagaacttgtggaactgctaacggagtccaaacatttagaacgtggtggaaacaagcaatcaaccaactgttcccggtacgtcggctgatgtcctactgcattttgtcagcacctggaaacatctgccttcttaaatgccagtaccattctaaagagaagatgagcatgagctcactccatcactcgatgagataatatgagatttctacttcggagaggccaagtctaatgaagagaaaaaaaggaaaagaagttgcaagactcgaataaaatctgctgcaccttgtaaatgctctaactggacatgaaggaaaggggcgagggaggggggtgggatttttggtgcaagtagcacatggtttaaatatgaatgaacaaacctgtgatctagtccttgtccttgtaattgtggattaatgtcaatgttaatccagcccctcaaagggagagaaaagctgggaccttttcccttggctgtaccatattcagcatttgatttccatgggccccaccatttatgtgtagaatttgaaatggttgtcacctctctctgaggacagagcttgaagcctccacaccagctgctagcttggagattcagaagcccacactgtgggtccgacgagggacacgctggctgggctggctgaagaatgaagaccactgggactctccggttaatctctaaggggtctgctcccccaggaacgtttctgaacaatggggactttgttggtagccatttggtagatgttcttttctatttataagtgactttaaactttcccttggctgttaagaagtttgttatagatttagctatttattgttcgatgcctgcatgctgaaacaatgcctacagctgtcttcacatgtatggacgtgtgtgaatggttgtacgttttgcacattttgtggctgttgagatgtgctttgctgcacaaacatgaaaatttttgagttacaatttggagcataactggagggtgggttggggaggggttggaaattttaaaatgtcaagacagggaaaggatgacaaacatggaaatttaaatgacatcctagaggtagagaaaaccggtggagatcgcttttcctcagactccaccaactttttcgagaatgggggatttcatgggggttagggttgtgctgattagggttagggggaggcttgctttccttggcccttcttccccaattcccatcgtgatttacttaattttcagtgctcagctgctgaaaatttggaaaaggaccaaattgctttacagttttttttctttgtgtagtatcttgaaatcctgggaaaattctatgggaatagttctgtatataggggcacaagtaaaggcattgtccaaagtttatttatttatttattaccctaaggaatgctttgccataacccacaattttacttggggaaaaaacggcatgtatcacagcatgtaaatttaactcaccacgatttactggggcctgaaactcattctcttcttggctatatgatttagccaagttctaggaaggtctccaaggacaataattacattgggcacaatgtattcttcaagtggtccacccgttagggccaaatctctttttaaaaaacttctttggttgcacaagtaacacatttggccacaaaacaccaaagaattgtagggcagtggccccctatgtgagaagttttcccggtagagttggaacactcagttgtgaatacattctttgctagttggacgtgcttgtttactaaggcatgtgcccgtccgtagggtattagtgtctagtctgcaaatagggtgccttcccctgagggtgcaggggaagaccaaagttttgcaactccgaactgctttccgtccatgtttctcacattggctgtattttaggaaaataggggttaagactggataacaaccttttacattgtgactgtgtttgcatttgtctaatgacagataaatcccttaacatttctctccaccttaagtactttagactaattgtggttgtcccgtccatgccatgaatggagtgggctggtagttggggcctaaaataaaatgagctgttggaagaaaaagaatcacagtactttccagcagtcagtccctggatttctctagctgtgttctaagcaatgactaaatgtctcattatgtactcgccaatgggcagtagtcagtgtcgtttatattgtagcaggttacacgctctgtacgtgttattgatgcaaatctgccaagagagagtgtatgtgtcactgcatggcttctgaaagcaggatgaattttctggcagctgttttccaagttggggtctgttcttgaatcctctagttaattactgtgtgttgacccagaagggaactgtggtaagggttgggccccccagccttgtaggggaactttctgggactccccactctgttggatcgatataggcatttggtctcactacttgacccattctcacccctgtgaaacgtcccacagctttgaagccaagtaccatgtcaccagcaccagtacacaccaagaaccttgggcataagacagaagaaggtccctccttaattttgtgggctggttgcctgtagaaacacagtaaacaaagggggcagcccctcccactttctggtataattgtgtcagcccctttttctttggggcttgacaccctgtcttgaagtagagagtgaattagcagctgccataatgttcccttcttcttgggctatttgaccactgtggtttcaacgtacacaaaacttctgtataagttgaaaggaaaaatgttcatggtctcatatgtacttagtttgctatgactacattttcgaggttttgtaaacactgttatttttttctttttcccacaatgtgaaccttgaaggtcaatacatttattcagagattttctcttcaaaaaaaaaaa

SEQ ID NO: 95 - DNA, 878 bp, Homo sapiens
  misc_feature: Incyte ID No: 3094835CB1
cggatgcggggacagcggcctggctaactcctgccaggcagtgcccttcccggagcgtgccctcgccgctgagctcccctgaacagcagctgcagcagccatggccccgccctgggtgcccgccatgggcttcacgctggcgcccagcctggggtgcttcgtgggctcccgctttgtccacggcgagggtctccgctggtacgccggcctgcagaagccctcgtggcacccgccccactgggtgctgggccctgtctggggcacgctctactcagccatggggtacggctcctacctggtctggaaagagctgggaggcttcacagagaaggctgtggttcccctgggcctctacactgggcagctggccctgaactgggcatggccccccatcttctttggtgcccgacaaatgggctgggccttggtggatctcctgctggtcagtggggcggcggcagccactaccgtggcctggtaccaggtgagcccgctggccgcccgcctgctctacccctacctggcctggctggccttcacgaccacactcaactactgcgtatggcgggacaaccatggctggcgtgggggacggcggctgccagagtgagtgcccggcccaccagggactgcagctgcaccagcaggtgccatcacgcttgtgatgtggtggccgtcacgctttcatgaccactgggcctgctagtctgtcagggccttggcccaggggtcagcagagcttcagaggttgccccacctgagcccccacccgggagcagtgtcctgtgctttctgcatgcttagagcatgttcttggaacatggaattttataagctgaataaagtttttgacttcctttaaaaaaaaaaaaaaaagg

SEQ ID NO: 96 - DNA, 1243 bp, Homo sapiens
  misc_feature: Incyte ID No: 1404669CB1
tgaggcgactggacccacactctcttaacctgccctccctgcactcgctcccggcggctcttcgcgtcacccccgccgctaaggctccaggtgccgctaccgcagcccctccatcctctacagctcagcatcagaacactctctttttagactccgatatggggtcctccaagaaagttactctctcagtgctcagccgggagcagtcggaaggggttggagcgagggtccggagaagcattggcagacccgagttaaaaaatctggatccgtttttactgtttgatgaatttaaaggaggtagaccaggaggatttcctgatcatccacatcgaggttttgaaacagtatcctacctcctggaagggggcagcatggcccatgaagacttctgtggacacactggtaaaatgaacccaggagatttgcagtggatgactgcgggccggggcattctgcacgctgagatgccttgctcagaggagccagcccatggcctacaactgtgggttaatttgaggagctcagagaagatggtggagcctcagtaccaggaactgaaaagtgaagaaatccctaaacccagtaaggatggtgtgacagttgctgtcatttctggagaagccctgggaataaagtccaaggtttacactcgcacaccaaccttatatttggacttcaaattggacccaggagccaaacattcccaacctatccctaaagggtggacaagcttcatttacacgatatctggagatgtgtatattgggcccgatgatgcacaacaaaaaatagaacctcatcacacagcagtgcttggagaaggtgacagtgtccaagtggagaacaaggatcccaagagaagccactttgtcttaattgctggggagccattaagagaaccagttatccaacatggtccatttgtgatgaacaccaatgaagagatttctcaagctattcttgatttcagaaacgcaaaaaatgggtttgaaagggccaaaacctggaaatcaaagattgggaactagtggaaagcggaagagcaggtcttgatgtgtcctagaattttgccatttctgagattgagccattgaaggcattccatttctaaagcttatttagccggtgcttctaaagaattccacactaacgtgataacatggtttttgtaacaataaatgtaggatatttcctggcacatgcaaataaacctaatcattgtttctttaaaaaaaaaaaa

SEQ ID NO: 97 - DNA, 654 bp, Homo sapiens
  misc_feature: Incyte ID No: 118619.34
gaaaactacaccaccgacttcatttaccagctgtattcagaagagggcaaaggcgtgtttgactgcaggaagaacgtgctgggtcacatgcagcagggtggggcaccctctccatttgatagaaactttggaaccaaaatctctgccagagctatggagtggatcactgcaaaactcaaggaggcccggggcagaggaaaaaaatttaccaccgatgattccatttgtgtgctgggaataagcaaaagaaacgttatttttcaacctgtggcagagctgaagaagcaaacggattttgagcacaggattcccaaagaacagtggtggctcaagctacggcccctcatgaaaatcctggccaagtacaaggccagctatgacgtgtcggactcaggccagctggaacatgtgcagccctggagtgtctgacccagtcccgcctgcatgtgcctgcagccaccgtggactgtctctttttgtaacacttaagttattttatcagcactttatgcacgtattattgacattaatacctaatcggcgagtgcccatctgccccaccagccccagtgcgtgctgtctgtggagtgtgtctcatgctttcagatgtgcatatgagcagaattaattaaacatttgcctacaactccaaaa

SEQ ID NO: 98 - DNA, 4065 bp, Homo sapiens
  misc_feature: Incyte ID No: 118619.8
  unsure 3146: a, t, c, g, or other
tctcacgtggctcctagtctcaagtccacacccccacttcatgctcttactcttggctgagtcccatggaggcccattagggaatcctgcaggatcagccgttgaccaggacggacggacggctggctggggaataccatgcttatgtcattcagagacaagcatttcttgagcgcctgctgtgggggctcggccgggtgctgctgatggtgcactggtgtaagcccagcccacagttcctgtcctcatggaatttgcagcctagtgaggaagatcctcccaagtcaaataaccacaaggtaactgcagggagagacaccgggataatttctgtgaagagaggacatggggtggctccgagagcccctgacagagggaactttgtggtcctagaaaccaggtggtgttttcctgaggaaatgacattttcctctggatcagagctgaggaaggtgcctctgtgtgtcccgtggccgctgtgacactgaccacacacctggggctggaaaataatactctctcccacagctctggagcgcaggagccatgggctgaggccagaatgtttgctccaggagcgtccctcgtggcccgttcaggtgcccagagttgcgggccttgcacgccttgtacgccttgttccctggcgcctcctccttccatgtgggtgtgcagcatcccgctccagggccttcagcctctgcgcccctcatctgctgatgcaggtgatggcatttaaggcccacctgggtactcctaggattcacctttatcaccgcatgagggagcattcccaggttccagggattagggataggactgggattcctttgggggctgctctcccgcccaccactgtgccggaatgtgatgcacacagcggccagcatatccaaaggccccaggaggacctggggtggctggaacaggacctggtgccgggagcaggcggggccggggattcccgacaaaggcttgatgtgtacttgaagtgagcaaagggttttgaataaaccaagaactggatcagatttatgttttttatagatggggtcctttctgtgtgaacggattggagggtcccggggtgggagctgaggcccaggaagagggcgttgcagccggactgatgtatgggtgggaaggcggccgatgcatttctttgccatttttctccccgccgagcttgggtcctcatggagggcggatggcagacatttcactctgggatccgatgcctgtgcatctggaagacttccccaggtgcctgggtctaagaaccaccatctgcctttgagtagagtttccataaatgtaacattcgccaatggatggaagatggccgcacctctaaaatcacagggagcttttcagaagaaaatagaatagcacagcggttctcacggactaagctggcaggggacagtcccctaacatctcagctaacacctaacggtgtctgtgtccggtgaaagcggcttcagcagggacagtcacagagcagcgtggagtgagctggcttgtggggtcgtcttttccgtccccttctatggggcctgggagaagggagcggcagatggccaggcccccaaaacgggacatcgaggtcacctccaggtggctgccatggtggggttgcgggggaccacgttcacacccactccgagggcacatcctggctgctgcacacccttcacctctgcgggatgctgggaccgcatgtttgggcgcggtgggggggccttgctgcactcactcttgggggagctctgggatggtgggcgcgccccgggcctgggctggagtgactgatcgcttctctgtgaccagacctgcgaccgcatcaagcagtccgccagcggaaccaagcggcgcgtgttcatcatcgagaccatgggcggctactgtggctacctggccaacatgggggggctcgcggccggagctgatgccgcatacattttcgaagagcccttcgacatcagggatctgcagtccaacgtggagcacctgacggagaaaatgaagaccaccatccagagaggccttgtgctcagaaatgagagctgcagtgaaaactacaccaccgacttcatttaccagctgtattcagaagagggcaaaggcgtgtttgactgcaggaagaacgtgctgggtcacatgcagcagggtggggcaccctctccatttgatagaaactttggaaccaaaatctccaccagaggaaggctgggaggagcagatgtgtgtcaaactctcggagaaccgtgcccggaaaaaaaggctgaatattattattgtggctgaaggagcaattgatacccaaaataaacccatcacctctgagaaaatcaaagagcttgtcgtcacgcagctgggctatgacacacgtgtgaccatcctcgggcacgtgcagagaggagggaccccttcggcatttgacaggatcttggccagccgcatgggagtggaggcagtcatcgccttgctagaggtcaccccggacaccccagcttgcgtcgtgtcactgaacgggaaccacgccgtgcgcctgccgctgatggagtgcgtgcagatgactcaggatgtgcagaaggcgatggacgagaggagatttcaagatgcggttcgactccgagggaggagctttgcgggcaacctgaacacctacaagcgacttgccatcaagctgccggatgatcagatcccaaagaccaattgcaacgtagctgtcatcaacgtgggggcacccgcggctgggatgaacgcagccgtacgctcagctgtgcgcgtgggcattgccgacggccacaggatgctcgccatctatgatggctttgacggctttgccaagggccagatcaaagaaatcggctggacagatgtcgggggctggaccggccaaggaggctccattcttgggacaaaacgcgttctcccggggaagtacttggaagagatcgccacacagatgcgcacgcacagcatcaacgcgctgctgatcatcggtggattcgaggcctacctgggactcctggagctgtcagccgcccgggagaagcacgaggagttctgtgtccccatggtcatggttcccgctactgtgtccaacaatgtgccgggttccgatttcagcatcggggcanacaccgccctgaacactatcaccgacacctgcgaccgcatcaagcagtccgccagcggaaccaagcggcgcgtgttcatcatcgagaccatgggcggctactgtggctacctggccaacatgggggggctcgcggctggagctgatgccgcatacattttcgaagagcccttcgacatcagggatctgcagtccaacgtggagcacctgacggagaaaatgaagaccaccatccagagaggccttgtgctcagaaatgagagctgcagtgaaaactacaccaccgacttcatttaccagctgtattcagaagagggcaaaggcgtgtttgactgcaggaagaacgtgctgggtcacatgcagcagggtggggcaccctctccatttgatagaaactttggaaccaaaatctctgccagagctatggagtggatcactgcaaaactcaaggaggcccggggcagaggaaaaaaatttaccaccgatgattccatttgtgtgctgggaataagcaaaagaaacgttatttttcaacctgtggcagagctgaagaagcaaacggattttgagcacaggattcccaaagaacagtggtggctcaagctacggcccctcatgaaaatcctggccaagtacaaggccagctatgacgtgtcggactcaggccagctggaacatgtgcagccctggagtgtctgacccagtcccgcctgcatgtgcctgcagccaccgtggactgtctgtttttgtaacacttaagttattttatcagcactttatgcacgtattattgacattaatacctaattggcgagtgcccatctgccccaccagctccagtgtgtgctgtctgtggagtgtgtctcatgctttcagatgtgcatatgagcagaattaattaaacatttgcctatgactcc

SEQ ID NO: 99 - DNA, 2168 bp, Homo sapiens
  misc_feature: Incyte ID No: 1383548.1
  unsure 2113, 2138, 2154: a, t, c, g, or other
atctcacgttagctagagacagaactggagctagcagtcagatctcttacaaagttgcctttcttcttctgtgggtaagtggggcacccttgggacgctgtgctgggcgtacatgggtgcttgatgaagttacttggtggactgatgtgattgatgtccaacatgtatgcagggacagaggctatggtccctacagagcaggcatggagagaaggagaaatacatacgggcaggagccaggagagggagggtgtagtgagcagagaccgcgccactgcactccagcctgagtgacagagtgagaatccatctaaaaaaaattgcttgctaaagaagtggtctcctgaggtcttaagacgttcctgacaatgtcttgagtgggtgggagagaggctgcagtcattgtgctgtggaatttcagaggtgagaaccacacctaaccaaaattactttccctgtttgcctcagtgacacagctgcaggaaccctggtgggtgttgtattaagtaaatttgacctttattctttgcagatctgtgaaatgttgtcttctgaggggccacgtgtatctgtagtgctgaggactccttgggcctctgaagtcacagagagaaccctgcagggtgggggaccagtgtgtgacagccctgctttgcattttctttgagaagtgctgtcattttgcatttctctccaccagggcaatcttcaatcttgagaggtgtgatcataacttgccttgtttcttgtcgctacagagaacggaaggctcccttgatggaacttagacagcaaggccagatgcacatccctggaaggacatccatgttccgagaagaacagatgatccctgtatttcaagacctctgtgcacttatttatgaacctgccctgctcccacagaacacagcaattcctcaggctaagctgccggttcttaaatccatcctgctaagttaatgttgggtagaaagagatacagaggggctgttgaatttcccacataccctccttccaccaagttggaacatccttggaaattggaagagcacaagaggagatccagggcaaggccattgggatattctgaaacttgaatattttgttttgtgcagagataaagaccttttccatgcaccctcatacacagaaaccaattttcttttttatactcaatcatttctagcgcatggcctggttagaggctggttttttctcttttcctttggtccttcaaaggcttgtagttttgggtagtccttgttctttggaaatacacagtgctgaccagacagcctccccctgtcccctctatgacctcgccctccacaaatgggaaaaccagactacttgggagcaccgcctgtgaaataccaacctgaagacacggttcattcaggcaacgcacaaaacagaaaatgaaggtggaacaagcacagatgttcttcaactgtttttgtctacactctttctcttttcctctaccatgctgaaggctgaaagacaggaagatggtgccatcagcaaatattattcttaattgaaaacttgaaatgtgtatgtttcttactaatttttaaaaatgtattccttgccagggcaggcaaggtggctcacgcctgtaatcccagcacttcaggaggctgaggtgggcggatcacctgaggtcaggagtttgagaccagcctgatgaaaccctgtctctactaaaaatacaagaattagccgggcgtggtggcgcatgcctgtagtatcagctactcaagaggctgaggtgagattatcgcttgaacccaggaaacggaggttgtagtgagcggagatcgcgccactgcactccagcctgagtgacagagtgagaatccatctcaaaaaaagacaaaaaacaaaattgcttgctaaagaagtggtctcctgaggtcttaagacattcctgacagtgtcttgagtgggtgggagagaggttgctgtcattgcgctgtggaatttcacagatgagaaccacgcctagccaaaatcacttttcctgtttgcctcagtgacacagctgcagggaccctcgtggatgttgtattaaataaatttgacctttactctttacaacatccacgantgcccttgctgcacccagaccaccngccaggagagaccttntctcccactccacc

SEQ ID NO: 100 - DNA, 4264 bp, Homo sapiens
  misc_feature: Incyte ID No: 197192.47
gcggcgtgcagtgtgaggggcgggacccggctgccggcggtgggtctagctgggggaggtcgggccatgctggtgggccagggcgcggggctgctggggcccgcggtggtcaccgccgcggtggtgctgctgctgagcggcgtggggccggcgcacggctcggaggacatcgtggtgggctgcggtggcttcgtcaagtcggacgtggagatcaactactcgctcatcgagataaagctgtacaccaagcatgggactttgaaataccagacagactgtgcccctaataatggttactttatgatccctttgtatgataagggggatttcattctgaagattgagcctcccctagggtggagttttgagccgacgaccgtggagctccatgtggatggagtcagtgacatctgcacaaagggtggggacatcaactttgtcttcactgggttctctgtgaatggcaaggtcctcagcaaagggcagcccctgggtcctgcgggagttcaggtgtctctgagaaacactgggaccgaagcaaagatccagtccacagttacacagcctggcggaaagtttgcattttttaaagttctgcctggagattatgaaatcctcgcaactcatccaacctgggcgttgaaagaggcaagcaccacagtgcgtgtaaccaactccaatgccaatgcggccagtcccctcatagttgctggctacaatgtgtctggctctgtccgaagtgatggggagcccatgaaaggcgtgaagtttcttctcttttcttctttagtaactaaagaggatgtcctgggctgcaatgtctcaccagtgcctgggttccagccccaagacgagagtctggtgtatttgtgctacacggtctccagagaagatggctcgttctctttctattccttgccaagtgggggctacactgtgattccgttctatcgaggggagaggattacctttgatgtggcgccttccagacttgacttcacagtggagcatgacagcttgaaaatcgagcccgtgttccacgtcatgggattctccgtcaccgggagggtcttgaacggacccgaaggagatggtgttccagaagcagtagtcaccctgaataaccaaatcaaagttaaaacaaaagctgatggctcattccgccttgagaacataaccacagggacatacaccatccatgctcagaaagagcacctctactttgaaacggtcaccatcaaaattgcaccgaacacacctcagctggctgacattattgcaacagggttcagtgtctgtggtcagatatcaatcattcgcttcccggacaccgtcaagcagatgaataaatacaaagttgtcctgtcatctcaagacaaggacaagtctttggtcaccgtggagacagatgctcatggatcattttgttttaaagcaaaaccagggacttacaaagtgcaggtgatggttcctgaggcagaaaccagagcagggctgacgttgaaaccccagacatttcctcttactgtgaccgacaggcccgtgatggatgtggcctttgtacagttcttggcatcagtttctgggaaagtctcttgtttggacacctgtggtgacttgctggtgactctacagtccctgagccgccagggtgagaagcggagcctccagctctccggcaaggtcaacgccatgactttcacctttgacaacgtgctccctggaaaatacaaaataagcatcatgcatgaggattggtgctggaagaacaagagcctggaggtggaagtgctggaggatgacgtgtctgcagttgagttcaggcagacgggctacatgctgagatgttccctgtctcacgccatcactctggaattttatcaggatggaaatgggcgtgagaatgtggggatttataacctctccaaaggagtcaaccgattctgcctgtccaagcctggtgtgtacaaagtgacccctcgctcctgccaccggtttgagcaagcgttctacacctatgacacgtcttcacctagtatcttgacattgacagccattcgccaccatgtccttggaactatcaccaccgacaaaatgatggatgtcactgtgactatcaagggccgtctttcttctaggtcttccatcgacagtgaacccgccttggtcttaggccctctgaagtctgtgcaggagctgcggagggagcagcagctggctgagatcgaggcccgcaggcaggagagggagaaaaacggcaatgaggaaggtgaagaaagaatgaccaagcctcccgtgcaggagatggtagatgagttacaaggccccttctcgtatgatttctcttactgggcgcggtctggagagaaaatcactgttacaccgtcatctaaagagctgctcttttatcccccttcaatggaagccgttgtcagtggagaaagctgcccagggaagctgatcgagatccacgggaaggcaggcctgtttttagaaggccagatccaccccgagttggaaggagtcgagattgtcatcagtgaaaagggggcaagttcaccgctgatcacagtctttactgatgacaaaggtgcctacagtgttggccccctgcacagtgacctggagtacacggtgacctcacagaaggagggctatgttctgactgcagtggaaggaaccatcggagacttcaaggcctatgccctggcaggcgtaagctttgagataaaagctgaggatgaccagcccctcccgggagtcctcttatccctgagtggtggcctgtttcgttccaacctcttgacccaggacaacggcattctgacattctcaaacctgagccctggccagtattacttcaaacccatgatgaaggagttccggtttgagccatcctcacagatgatcgaggtgcaggaaggccagaacctgaagatcaccatcacggggtaccgaaccgcttacagttgctatggcacagtgtcttccttaaacggagagcccgaacaaggggttgccatggaagcggtgggccagaacgactgcagcatttacggagaagacaccgtgacagacgaagagggcaagttcagattacgtggattgctgccgggatgtgtgtaccacgttcagctcaaggcagaaggcaacgaccacattgagcgggcgctcccccaccatagggtgattgaggttgggaataatgacatcgatgatgtaaacatcatagttttccggcagattaatcaatttgatttaagtggaaatgtgatcacttcctctgaataccttcctacattatgggtcaagctttacaaaagcgaaaacctcgacaatccaatccagacagtttcccttggccagtccctgttcttccatttccccccactgctcagagacggcgagaactatgttgtgcttctggactccacactccccagatcccagtatgactacatcttgcctcaagtttctttcaccgcagtgggctaccataaacacatcaccttgatttttaatcccacgaggaagctgcctgaacaggacatcgcacaaggatcctacattgccctgccattgacgctgctggttctgctggccggttacaaccatgacaagctcattcctttgctgctgcagttgacaagccggctacagggagtccgcgcgctcggccaggcagcctctgacaatagcggcccagaagatgcaaagagacaagccaagaaacagaagacaaggcggacttgaggaggaaggggacagttgcagtctcacttgggacaggccacagccaggggtccggccactacccgcccgtgggataaaagccaaaagcatgcgtcagctaacttcagcctgtgctgctgggcccgcaccccatgtcccttgtcactgtggcatcctgcacccatcctcacccctccgtagagcccctcgtgcaatgcaatgaatggaccctcctgtcactctgctgaacagaatttattttctgagtcaaatataatttattattatttttgtcaaagaagtatttaagctgtgctgtggtgtgagaatgtcattcttgatcttcagccttcgtttgcaagaagagttccagttgacgtggtgtttggttccatggcggggtaccctagggattcatctgttttcttcacttccctttgcatctgagatcctgctggaaaccacggcaacctgtatccactattaggaggtaaaaatcaataaaatggcccattcatttgtgttgtagctc

SEQ ID NO: 101 - DNA, 5652 bp, Homo sapiens
  misc_feature: Incyte ID No: 020906.19
  unsure 4458: a, t, c, g, or other
gcagctgcagcgtgtagtgcgagtggggcggacgcgcgcagcccgcccgcccggcgaccagcaaggagttggcatccttaggaagagttcgtgaaagctttctgcccagagctcctggaccaatgcatcttcccaccaccttaaaccactggagttggcatcctttggaagagttcgtgaaagctttctgcccagagctcctggaccaatgcatcttcccaccaccttaaaccactgagcagttcagagccccagttgcagacgacttgtcctgccaccaccatgagttctgaatgtgatggtggttccaaagctgtgatgaatggcttggcacctggcagcaatgggcaagacaaagacatggatcctacaaaaatctgcactgggaagggagcggtgactctccgggcctcgtcttcctacagggaaaccccaagcagtagccctgcgagccctcaggaaacccggcaacacgaaagcaaaccaggtctggagccagagccttcttcagcagatgagtggaggctttcttccagtgctgatgccaatggaaatgcccagccctcttcactcgctgccaagggctacagaagtgtgcatcccaaccttccttctgacaagtcccaggattccagtcctctactaaatgaagtttcttcttcccttattggaactgattcccaagcctttccatcagttagcaagccttcatccgcctatccctccacaacgattgtcaatcctactattgtgctcttgcaacacaatcgagaacagcaaaaacgactcagtagcctttcagatcctgtctcagaaagaagagtgggagagcaggactcagcaccaacccaggaaaaacccacctcacctggcaaggctattgaaaaaagagcaaaggatgacagtaggcgggtggtgaagagcactcaggacttaagcgatgtttccatggatgaagtgggcatcccactccggaacactgagagatcaaaagactggtacaagactatgtttaaacagatccacaaactgaacagagatgatgattcagatctgtactctcccagatactcattttccgaagacacaaaatctcccctttctgtgcctcgctcaaaaagtgagatgagctacattgacggtgtgaaggtagtcaagaggtcggccacactacccctcccagcccgctcttcctcactgaagtcaagctcagaaagaaatgactgggaacccccagataagaaagtagatacaagaaaatatcgtgcagagcccaagagcatttacgaatatcagcctggcaagtcttccgttctgaccaacgaaaagatgagctcagccatcagccctactccgggaatttcttcagagactcctggatatatatattcttccaacttccacgcagtgaagagggaatcagacggggctcctggggatctcactagcttggagaatgagagccaaatttataaaagtgtcttggaaggtggtgtcatccctcttcaggacctgagtgggctcaagcgaccatccagctctgcttccactaaaaattcagaatcgccaagacattttataccagctgattacttggaatccacggaagaatttattcgaagacgtcatgatgataaagagatgagacctgccagagccaaatttgactttaaagctcagacactaaaggagcttcctctgcagaagggagatattgtttacatttataagcaaattgatcagaactggtatgaaggagaacaccacggccgggtgggaatcttcccacgcacctacatcgagcttcttcctcctgctgagaaggcacagcccaaaaagttgacaccagtgcaggttttggaatatggagaagctattgctaagtttaactttaatggtgatacacaagtagaaatgtccttcagaaagggtgagaggatcacactgctccggcaggtagatgagaactggtacgaagggaggatcccggggacatcccgacaaggcatcttccccatcacctacgtggatgtgatcaagcgaccactggtgaaaaaccctgtggattacatggacctgcctttctcctcctccccaagtcgcagtgccactgcaagcccacagcaacctcaagcccagcagcgaagagtcacccccgacaggagtcaaacctcacaagatttatttagctatcaagcattatatagctatataccacagaatgatgatgagttggaactccgcgatggagatatcgttgatgtcatggaaaaatgtgacgatggatggtttgttggtacttcaagaaggacaaagcagtttggtacttttccaggcaactatgtaaaacctttgtatctataagaagactgaaaaccatggagattatttttattggaggaggaagcatcattcatgaaccgatctttttagttgagtcagtaggaaaattaatacagtggataaagtaagaagcaaaagacagggacagagaagtgttgtgtttaaaacccaagcctgtctaaggttactgtgtattagacagggccgaactagtgtgctgagcaaaaagaattgaagcaaattgtatttacttagccgcttctgggagccacttcagcctttcccctcccctccacttcttgggtaatctgacctgaagcatagtccaggagcagagttagccagaaatgcctcctgctgccccagccttagagagctcccatctcaatcattgagcctgaaggcttcaagcccaagaatgcaacaagacccccagcctacatttctcagctcccctggagccagctgatcctgtaacgctgctggaggtcagtctgagctaccaagactgtccctagacaaaggtggagtcccccacactgcccaagagcaaatccctcactcaacctgctgaggtgtggatggggaaacagaggcaaaactgaggcacctgatgcattcagcctgctgtgcagcagtgccattgactgccctgatgttcagagagaaacgcacacaaggtttgcccatgagaattggggagcagacggccaagcagataggttatgtctgttttctgagtgatgaagtcaggaagccctgtggctctggaggccacttgtggttcattcttttcccatatccttggcttttagaaatggttaccttcaggacagtgcagctgcatttatcagagcactattgctaagttttcttttctggcttgtgtttttctgggacagtttagaattgggaggcctattctcatagaacaccaaaaatgatgttcagtgattcatttaacatacaccaatgtactctggctgctggggggacaaccataagcaagacatgcccagggtttgccgtggctccagatctactccctgtaggagttcaaggatcacacaaacggtagtaaccagggttgtgaatctgagtacaccctggcaaggcttctcttcagactgaagcagcaattctgccactaccagcagcaaccaggatgtctgttctttgtgggggccagatcagaagagagaggcccctgtgacgcccgggctgcttggtcacaactctgtccaattcaaggatgtttatcggcctctcttagatcctgagtgagacaaatacagaaatgacccattccctgcccaccagaaactcagaggtgattggggagactgacacaggaaaatgaacttaatcaagagagactgtgatatgtgctaagaagggtgtgagggagggagagatgaattttccctggagggatcctagaaagcattgtcatattgccatctccattagctcacttttaaacaactagggtgctggaagaacctttgtctgagggtagttcatagctggaaatacttggaatattttccagagtctctaaactctcatcttcccccacagatacacatccaagctcacaaataggagtagcaattctaggtggtagggttgtgtacggaacccctggctgtctgcatatatctcagaattaccccaggaccattgtcccaaagtctagagtctttacaggtaggcaaaatttgttttcaatgcctgtgcctcagctgctgtcacaaatacccatcttaggatcccatcagcttcccatcccccaccagacagccacagtaccctcactttctccctattgttctttcaaatcctgttctcaggaaagaaactgccactaattcattcacactaaggtgtaaatgattgataataggaatgagttacctcttcccacagacatttgtttttaagtatgacagagcagggccttaatcccaagggaaaaggttatggaactggagggggtgagctttctgggtagaaggagacttcctgaatttccttaaaacccagtaagagtaagacctgttgttttggaaggtctgctccaccatctaagagcactgttttttttttgttgtngttgttggttggttttacggtctctgagggaatatagtaaaaatgcatatgcacgtgcaatttgcacggcagcatttcaccgattgtggactgtattggctaatgtgtttcctggtctttagatgcaaaccattaataacactatcttatctcatagttttttcaggggtgcttcttgattagtagggaattttgaacacctctttaaatacagctagaaaataaaaccaatttgtaaagccacatttgcatatgatgccagcctcacgcatttgtatatctccagaaattcaggtatgcctcaccaatttgcccgtctttaataaaatcttgtgttaaaatttgcatcacgtcgccttcctatgtatgacgaaacaagaaacagagatttccaattgctcttttgtcttcagacatttagtaatataaagtacctatttttatgctgaaatgtttatacaggtttattaatagcaagtgcaactaactggcggcatgccttgcaacacattttgatatattagccatgcttccgggtaaaggcaagccccaaactccttatcttttgcagtctctctgggatcagtaaaagaaaaaaaaaaataatgtgcttaagaagtgggactgtaaatatgtatatttaactttgtatagcccatgtacctaccttgtatagaaaaataattttaaaaatttgaatggaagggggtaaaggaagtcatgaagtttttttgcatttttatttaaatgaaggaattccaaataactcacctacagatttttagcacaaaaatagccattgtaaagtgttaaaatttacgataagtattctattggggaggaaaggtaactctgatctcagttacagttttttttccctttttaatttcattatttggggttttgggttttggcagtcctatttatctgcagtcgtattaagtcctattgctagaataggttactacaaaaaagattatattctgaaagaaaaataactgacattatatataaccaattaatttaaagtattgccatttaaattacacactgagagcatgtcctatgcagacatagatttttctgttcatttatttttcttcattgcagtggattgatttgataaatagatgtgttgaattactacatttgctgtacatattatttaataaactttattcagaattgcgtggc

SEQ ID NO: 102 - DNA, 4967 bp, Homo sapiens
  misc_feature: Incyte ID No: 334025.2
gctcagtcttagcagattcagtgtggaagcagctatcaaaaaggccataaggattttgtccccaaatttcacatgagctaccttgcttcaaactactgagatgaagggggcaagattatttgtccttctttctagtttatggagtgggggcattgggcttaacaacagtaagcattcttggactatacctgaggatgggaactctcagaagactatgccttctgcttcagttcctccaaataaaatacaaagtttgcaaatactgccaaccactcgggtcatgtcggcggagatagctacaactccagaggcaagaacttctgaagacagtcttcttaaatcaacactgcctccctcagaaacaagtgcacctgctgagggtgtgagaaatcaaactctcacatccacagagaaagcagaaggagtggtcaagttacagaatcttaccctcccaaccaacgctagcatcaagttcaatcctggagcagaatcagtggtcctttccaattctacactgaaatttcttcagagctttgccagaaagtcaaatgaacaagcaacttctctaaacacagttggaggcactggaggcattggaggcgttggaggcactggaggcgtgggaaatcgagccccacgggaaacatacctcagccggggtgacagcagttccagccaaagaactgactaccaaaaatcaaatttcgaaacaactagaggaaagaattggtgtgcttatgtacataccaggttatctcccacagtgatattggacaaccaggtcacttatgtcccaggtgggaaaggaccttgtggctggaccggtggatcctgtcctcagagatctcagaagatatccaatcctgtctataggatgcaacataaaattgtcacctcattggattggaggtgctgtcctggatacagtgggccgaaatgtcaactaagagcccaggaacagcaaagtttgatacacaccaaccaggctgaaagtcatacagctgttggcagaggagtagctgagcagcagcagcagcaaggctgtggtgacccagaagtgatgcaaaaaatgactgatcaggtgaactaccaggcaatgaaactgactcttctgcagaagaagattgacaatatttctttgactgtgaatgatgtaaggaacacttactcctccctagaaggaaaagtcagcgaagataaaagcagagaatttcaatctcttctaaaaggtctaaaatccaaaagcattaatgtactgataagagacatagtaagagaacaatttaaaatttttcaaaatgacatgcaagagactgtagcacagctcttcaagactgtatcaagtctatcagaggacctcgaaagcaccaggcaaataattcaaaaagttaatgaatctgtggtttcaatagcagcccagcaaaagtttgttttggtgcaagagaatcggcccactttgactgatatagtggaactaaggaatcacattgtgaatgtaaggcaagaaatgactcttacatgtgagaagcctattaaagaactagaagtaaagcagactcatttagaaggtgctctagaacaggaacactcaagaagcattctgtattatgaatccctcaataaaactctttctaaattgaaggaagtacatgagcagcttttatcaactgaacaggtatcagaccagaagaatgctccagctgctgagtcagttagcaataatgtcactgagtacatgtctactttacatgaaaatataaagaagcagagtttgatgatgctgcaaatgtttgaagatttgcacattcaagaaagcaagattaacaatctcaccgtctctttggagatggagaaagagtctctcagaggtgaatgtgaagacatgttatccaaatgcagaaatgattttaaatttcaacttaaggacacagaagagaatttacatgtgttaaatcaaacattggctgaagttctctttccaatggacaataagatggacaaaatgagtgagcaactaaatgatttgacttatgatatggagatccttcaacccttgcttgagcagggagcatcactcagacagacaatgacatatgaacaaccaaaggaagcaatagtgataaggaaaaagatagaaaatctgactagtgctgtcaatagtctaaattttattatcaaagaacttacaaaaagacacaacttacttagaaatgaagtacagggtcgtgatgatgccttagaaagacgtatcaatgaatatgccttagaaatggaagatggcctcaataagacaatgactattataaataatgctattgatttcattcaagataactatgccctaaaagagactttaagtactattaaggataatagtgagatccatcataaatgtacctccgatatggaaactattttgacatttattcctcagttccaccgtctgaatgattctattcagactttggtcaatgacaatcagagatataactttgttttgcaagtcgccaagacccttgcaggtattcccagagatgagaaactaaatcagtccaacttccaaaagatgtatcaaatgttcaatgaaaccacttcccaagtgagaaaataccagcaaaatatgagtcatttggaagaaaaactactcttaactaccaagatttccaaaaattttgagactcggttgcaagacattgagtctaaagttacccagacgctcataccttattatatttcagttaaaaaaggcagtgtagttacaaatgagagagatcaggctcttcaactgcaagtattaaattccagatttaaggcgttggaagcaaaatctatccatctttcaattaacttcttttcgcttaacaaaactctccacgaagttttaacaatgtgtcacaatgcttctacaagtgtgtcagaactgaatgctaccatccctaagtggataaaacattccctgccagatattcaacttcttcagaaaggtctaacagaatttgtggaaccaataattcaaataaaaactcaagctgccctatctaatttaacttgttgtatagatcgatcgttgcctggtagtctggcaaatgttgtcaagtctcagaagcaagtaaaatcattgccaaagaaaattaacgcacttaagaaaccaacggtaaatcttaccacagtcctgataggccggactcaaagaaacacggacaacataatatatcctgaggagtattcaagctgtagtcggcatccgtgccaaaatgggggcacgtgcataaatggaagaactagctttacctgtgcctgcagacatccttttactggtgacaactgcactatcaagcttgtggaagaaaatgctttagctccagatttttccaaaggatcttacagatatgcacccatggtggcattttttgcatctcatacgtatggaatgactatacctggtcctatcctgtttaataacttggatgtcaattatggagcttcatataccccaagaactggaaaatttagaattccgtatcttggagtatatgttttcaagtacaccatcgagtcatttagtgctcatatttctggatttttagtggttgatggaatagacaagcttgcatttgagtctgaaaatattaacagtgaaatacactgtgatagggttttaactggggatgccttattagaattaaattatgggcaggaagtctggttacgacttgcaaaaggaacaattccagccaagtttccccctgttactacatttagtggctatttattatatcgtacataagttagtatgaaaaacagactatcacctttattgagaaacagccagtgttttcatttatctttgcttgcacatctgctctgttttggtttttctacaggaaatgaaaatcaacttgtttttttaatatgagtaaacttgtatgtctattttataaaattatttgaatattgtttaatgtctgaatatgaaagagttcttgatcctaaagaaatttagtggcacagaaaacaaagtgaatttgttagcataattattcctattcttatttcttcattttaagtcattgcaatggaaagtaatattataaaacggtaattacaacatattatcagtcacagttttctttccaattaaacacttaacttttgttattccctgtatataaatatataacacacattttctagattcacaaatttaaataaattactcaaaaaatgaaaattgattttgtaaacttttatttttactctttacgttgagttgatcaattttccatactaagattttcattcagaatcaaaattaagaaagttggactgaaaatatgaaaaatgcttaactattgttctcttcctataattctctaattataacatagtaatttacatgtagttggacatgtacactcaagtctaagaatatatgagtggatcatttaccgccccccgccccacaacatctataaggggcaaaaagtctttttctaataagtattcttctatggtagtacctacagatctgcccttcttcttctaaagggtaagtcataatctgtgtaatactacaatttatgggatgctcactatgccctgtttctcttctaaacaatttacatgtaatgtctcattcctcacaataacccttgtaaagtgggcatgattaccatgatttttatagttgaagaacctaagacacagagaccaaggcccatgagctcatagggctgaggcaggatttggaatcaggccatgtcttctccagagcccacatccatcctttctctatattgcctcccacagactgtgctaaaatttatttaactgaatcctttatcctctactttgtgttgtctgcccattgttttattattacaatagttactgtggtgacatgcttaaaaatacattccttggatatctgacaacgtgtttctgaaacacagattttcataagtaat

SEQ ID NO: 103 - DNA, 3535 bp, Homo sapiens
  misc_feature: Incyte ID No: 201166.6
aagtgaaaggtctcgcaaagttcagcggcggctgcgggcgccgagccccgggctagcggcagacgagcccgcagggccgctccgcggggcagcgcagccaggccggctatggtcccggggctcccgccgccccccaggtgcccgggacccgccaggccggtgcgcgagggtcaccccacctccccgcgcggtcccggcccctggctcccagctgccggcgaccgctgaccgagcccggcgccccaggaggaggaagaaaccagggccccgttccctcccgaggacggcggcgcttcatcccgcagcccagaggtctcggctccctccggcacccgcccggcccggctgctcccggctcctcccggccatggggagctgcgcgcggctgctgctgctctggggctgcacggtggtggccgcaggactgagtggagtagctggagtgagttcccgctgtgaaaaagcctgcaaccctcggatgggaaatttggctttggggcgaaaactctgggcagacaccacctgcggtcagaatgctaccgaactgtactgcttctacagtgagaacacggatctgacttgtcggcagcccaaatgtgacaagtgcaatgctgcctatcctcacctggctcacctgccatctgccatggcagactcatccttccggtttcctcgcacatggtggcagtctgcggaggatgtgcacagagaaaagatccagttagacctggaagctgaattctacttcactcacctaattgtgatgttcaagtcccccaggccggctgccatggtgctggaccgctcccaggactttgggaaaacatggaagccttataagtactttgcgactaactgctccgctacatttggcctggaagatgatgttgtcaagaagggcgctatttgtacttctaaatactccagtccttttccatgcactggaggagaggttattttcaaagctttgtcaccaccatacgatacagagaacccttacagtgccaaagttcaggagcagctgaagatcaccaaccttcgcgtgcagctgctgaaacgacagtcttgtccctgtcagagaaatgacctgaacgaagagcctcaacattttacacactatgcaatctatgatttcattgtcaagggcagctgcttctgcaatggccacgctgatcaatgcatacctgttcatggcttcagacctgtcaaggccccaggaacattccacatggtccatgggaagtgtatgtgtaagcacaacacagcaggcagccactgccagcactgtgccccgttatacaatgaccggccatgggaggcagctgatggcaaaacgggggctcccaacgagtgcagaacctgcaagtgtaatgggcatgctgatacctgtcacttcgacgttaatgtgtgggaggcatcagggaatcgtagtggtggtgtctgtgatgactgtcagcacaacacagaaggacagtattgccagaggtgcaagccaggcttctatcgtgacctgcggagacccttctcagctccagatgcttgcaaaccgtgttcctgccatccagtaggatcagctgtccttcctgccaactcagtgaccttctgcgaccccagcaatggtgactgcccttgcaagcctggggtggcagggcgacgttgtgacaggtgcatggtgggatactggggcttcggagactatggctgtcgaccatgtgactgtgcggggagctgtgaccctatcaccggagactgcatcagcagccacacagacatagactggtatcatgaagttcctgacttccgtcccgtgcacaataagagcgaaccagcctgggagtgggaggatgcgcaggggttttctgcacttctacactcaggtaaatgcgaatgtaaggaacagacattaggaaatgccaaggcattctgtggaatgaaatattcatatgtgctaaaaataaagattttatcagctcatgataaaggtactcatgttgaggtcaatgtgaagattaaaaaggtcttaaaatctaccaaactgaagattttccgaggaaagcgaacattatatccagaatcatggacggacagaggatgcacttgtccaatcctcaatcctggtttggaataccttgtagcaggacatgaggatataagaacaggcaaactaattgtgaatatgaaaagctttgtccagcactggaaaccttctcttggaagaaaagtcatggatattttaaaaagagagtgcaagtagcattaagatggatagcacataatggcacttgtctatgtacaaaacacaaactttagagcaagaagacctcagacaggaaactggaattttttaaagtgccaaaacatatagaaatgtttgaatgcatgggtcttatctaatttatctcttctggacccatgtttaaatacagttttatttcatgaagagaaatgaaaacccctacactgatatctgttttctatgggactgattctgaaattcttaactattaagaatattttaatagcagcatgacatttagcagtaatccattaagggcagtacctctaacaaggacgccttccagcttcagctatgttacttacgtttgatgctacttaaagtaatgaatgacgttttaaggaatccctaaccctactatcagaaaaggtgtttgttaaagagccttctcttgtgtgttacgcatgaactttggtctgtaggtgttaaatggaacctctccatgtgtatatagtatttccttgtataaagcactttactacctaccacttgtgttgtgaacgtttggtgactgctgttgaaagaaggaaaagggtgtgtgagaaagcctactgaagcagcagcactgccactacatgtggacaaaagtgaacatataaaagaagttgtgctatttaactctgaatacttggagaaactaggtgaagatgcaaccagaaaggagaatatgtatgcgtgaagtctcagctttgagctggaggctagattccaagatgacagccatgatgaaactttttaaaaaactaaaccagaagagactttaaaataagagaaagaaatcataaatgtagacatatgcttggctaaaggggaaatggactttaaattttaaagagctcatttgcaatgcacttgtatacacttcaaaaattattgtagacacagaatttgttatatttttgtgcttagtatttaaacctgaacattgaaacagttttcctccttgtctttcttaacagtaatagtcattatatttacctgttttttaacacaatgtatgtgatagtcaaaaaatcacagtttttcattattattcatcttctgtacccacgcataaccactatacatagtttcttttgtacttgaatatacaaaacatgaacacagtgccatatgaataatttcacatacagaacctttttttctctgaagtcctgtggacttgcaaatatatatatatattgctttgttaatttgtttttatatttcatatatgtaataaaggaatatgatctgaaa

SEQ ID NO: 104 - DNA, 4149 bp, Homo sapiens
  misc_feature: Incyte ID No: 1383093.19
  unsure 1492-1495, 1663, 1669, 4012, 4055: a, t, c, g, or other
aaaaactctatttcaccaccccaagtgtctttataaatctcaaccacatatttttaaatgttgtgccattggtctcaaggatgaatcagatacaaaagtattcatgccaagatgtaaactcaccgtcatcactagagaaaagatatccaaggatatgtcctagtaataggaggtcattagcctttttctaagctgaagacagtttattctcacaatcttcaagccaacctgtgttatcacctagggtcttacccataatactcagtattttttctctatttagggacctcctggcactccaggtcctcagggtcttcttggtgctcctggtattctgggtctccctggctcgagaggtgaacgtggtctaccaggtgttgctggtgctgtgggtgaacctggtcctcttggcattgccggccctcctggggcccgtggtcctcctggtgctgtgggtagtcctggagtcaacggtgctcctggtgaagctggtcgtgatggcaaccctgggaacgatggtcccccaggtcgcgatggtcaacccggacacaagggagagcgcggttaccctggcaatattggtcccgttggtgctgcaggtgcacctggtcctcatgtgcccgtgtgtcctgctggcaacatggaaaccgtgtgaaatggtccttctggtcctgttggtcctgctggtgctgttggcccaagaggtcctagtggcccacaaggcattcgtggcgataagggagagcccggtgaaaaggggcccagaggtcttcctggcttaaagggacacaatggattgcaaggtctgcctggtatcgctggtcaccatggtgatcaaggtgctcctggctccgtgggtcctgctggtcctaggggccctgctggtccttctggccctgctggaaaagatggtcgcactagacatcctggtacagttggacctgctggcattcgaggccctcagggtcaccaaggccctgctggcccccctggtccccctggccctcctggacctccaggtgtaagcggtggtggttatgactttggttacgatggaaacaagggtgaacctggtgtggttggtgctgtgggcactgctggtccatctggtcctagtggactcccaggagagaggggtgctgctggcatacctggaggcaagggagaaaagggtgaacctggtctcagaggtgaaattggtaaccctggcagagatggtgctcgtggtgctcctggtgctgtaggtgcccctggtcctgctggagccacaggtgaccggggcgaagctggggctgctggtcctgctggtcctgctggtcctcggggaagccctggtgaacgtggtgaggtcggtcctgctggccccaatggatttgctggtcctgctggtgctgctggtcaacctggtgctaaaggagaaagaggagccaaagggcctaagggtgaaaacggtgttgttggtcccacaggccccgttggagctgctggcccnnnnggtccaaatggtccccccggtcctgctggaagtcgtggtgatggaggcccccctggtatgactggtttccctggtgctgctggacggactggtcccccaggaccctctggtatttctggccctcctggtccccctggtcctgctgggaaagaagggcttcgtggaccncgaggngaccaaggaccagcaggccgacctggagaagtaggagcaccgggtccccctggcttcgctggtgagaagggtccctctggagaggctggtactgctggacctcctggcactccaggtcctcagggtcttcttggtgctcctggtattctgggtctccctggctcgagaggtgaacgtggtctacctggtgttgctggtgctgtgggtgaacctggtcctcttggcattgccggccctcctggggcccgtggtcctcctggtgctgtgggtagtcctggagtcaacggtgctcctggtgaagctggtcgtgatggcaaccctgggaacgatggtcccccaggtcgcgatggtcaacccggacacaagggagagcgcggttaccctggcaatattggtcccgttggtgctgcaggtgcacctggtcctcatggccccgtgggtcctgctggcaaacatggaaaccgtggtgaaactggtccttctggtcctgttggtcctgctggtgctgttggcccaagaggtcctagtggcccacaaggcattcgtggcgataagggagagcccggtgaaaaggggcccagaggtcttcctggcttaaagggacacaatggattgcaaggtctgcctggtatcgctggtcaccatggtgatcaaggtgctcctggctccgtgggtcctgctggtcctaggggccctgctggtccttctggccctgctggaaaagatggtcgcactggacatcctggtacagttaggacctgctggcattcgaggccagcagggtcaccaaggccctgctggcccccctggtccccctggccctcttggacctctaggtgtaagcggtggtggttatgactttggttacgatggagacttctacagggctgaccagccttctctcagacccaaggactatgaagttgatgctactctgaagtctctcaacaaccagattgagacccttcttactcctgaaggctctagaaagaacccagctcgcacatgccgtgacttgagactcagccacccagagtggagcagcggttactactggattgaccccaaccaaggatgcactatggaagccatcaaagtatactgtgatttccctaccggcgaaacctgtatccgggcccaacctgaaaacatcccagccaagaactggtataggagctccaaggacaagaaacacgtctggctaggagaaactatcaatgctggcagccagtttgaatataatgttgaaggagtgacttccaaggaaatggctacccaacttgccttcatgcgcctgctggccaactatgcctctcagaacatcacctaccactgcaagaacagctattgcatactatggttgtaggtagactggcaacctgataaaaggctgtcattctacagggctctaatgatgttgaacttgttgctgagggcaacagcaggttcacttacactgttcttgtaagatggctgctctaaaaagacaaatgaatggggaaagacaatcattgaatacaaaacaaataagccatcacgcctgcccttccttgatattgcacctttggacatcggtggtgctgaccaggaattctttgtggacattggcccagtctgtttcaaataaatgaactcaatctaaattaaaaaagaaagaaatttgaaaaaaactttctctttgccatttcttcttcttcttttttaactgaaagctgaatccttccatttcttctgcacatctacttgcttaaattgtgggcaaaagagaaaaagaaggattgatcagagcattgtgcaatacagtttcattaactccttcccccgctcccccaaaaatttgaatttttttttcaacactcttacacctgttatggaaaatgtcaacctttgtaagaaaaccaaaataaaaattgaaaaataaaaaccataaacatttgcaccacttgtggcttttgaatatcttccacagagggaagtttaaaacccaaacttccaaaggtttaaactacctcaaaacactttcccatgagtgtgatccacattgttaggtgctgacctagacagagatgaactgaggtccttgttttgtttttttcacaatacaaaggtgctaattaatagtatttcagatacttgaagaatgttgatggtgctagaagaatttgagaagaaatactcctgtattgagttgtatcgtgtggtgtattttttaaaaaaatttgatttagcattcatattttccatcttattcccaattaaaagtatgcagattatttgcccaaatcttcttcagattcagcatttgttctttgcccagtctcattttcatcttcttccatgggntccacagaagctttggtttcttggggcaagcagaaaaattaantagcacctattttgtatatgtgagatgtttaaataaattatgaacaaaatgaaataaagcatgtttggttttccaaaagaaaaaaaaaaaaaaa

SEQ ID NO: 105 - DNA, 4036 bp, Homo sapiens
  misc_feature: Incyte ID No: 3741842CB1
gtcgcctctcacccgccccggccgctccagcccgaggcgccccgaccccgcgccactccgcgcccggccagccgcccgcagccatggggctcctgcccaagctcggcgtgtcccagggcagcgacacctctactagccgagccggccgctgtgcccgctcggtcttcggcaacattaaggtgtttgtgctctgccaaggcctcctgcagctctgccaactcctgtacagcgcctacttcaagagcagcctcaccaccattgagaagcgctttgggctctccagttcttcatcgggtctcatttccagcttgaatgagatcagcaatgccatcctcatcatctttgtcagctactttggcagccgggtgcaccgtccacgtctgattggcatcggaggtctcttcctggctgcaggtgccttcatcctcaccctcccacacttcctctccgagccctaccagtacaccttggccagcactgggaacaacagccgcttgcaggccgagctctgccagaagcattggcaggacctgcctcccagtaagtgccacagcaccacccagaacccccagaaggagaccagcagcatgtggggcctgatggtggttgcccagctgctggctggcatcgggacagtgcctattcagccatttgggatctcctatgtggatgacttctcagagcccagcaactcgcccctgtacatctccatcttatttgccatctctgtatttggaccggctttcgggtacctgctgggctctgtcatgctgcagatctttgtggactatggcagggtcaacacagctgcagttaacttggtcccgggtgacccccgatggattggagcctggtggctaggcctgctcatttcttcagctttattggttctcacctctttccccttttttttcttccctcgagcaatgcccataggagcaaagagggctcctgccacagcagatgaagcaaggaagttggaggaggccaagtcaagaggctccctggtggatttcattaaacggtttccatgcatctttctgaggctcctgatgaactcactcttcgtcctggtggtcctggcccagtgcaccttctcctccgtcattgctggcctctccaccttcctcaacaagttcctggagaagcagtatggcacctcagcagcctatgccaacttcctcattggtgctgtgaacctccctgctgcagccttggggatgctgtttggaggaatcctcatgaagcgctttgttttctctctacaagccattccccgcatagctaccaccatcatcaccatctccatgatcctttgtgttcctttgttcttcatgggatgctccaccccaactgtggccgaagtctacccccctagcacatcaagttctatacatccgcagtctcctgcctgccgcagggactgctcgtgcccagattctatcttccacccggtctgtggagacaatggaatcgagtacctctccccttgccatgccggctgcagcaacatcaacatgagctctgcaacctccaagcaactgatctatttgaactgcagctgtgtgaccgggggatccgcttcagcaaagacaggatcgtgccctgtcccctgtgcccacttcctgctcccggccatcttcctcatctccttcgtgtccctgatagcctgcatctcccacaaccccctctacatgatggttctgcgtgtggtgaaccaggaggaaaagtcatttgccatcggggtgcagttcttgttgatgcgcttgctggcctggctgccatctccagccctctatggcctcaccattgaccactcctgcatccggtggaactcgctgtgcttggggaggcgaggggcctgcgcctactatgacaacgatgctctccgagacaggtacctgggcctgcagatgggctacaaggcgctgggcatgctgctgctttgcttcatcagctggagggtgaagaagaacaaggagtacaacgtgcagaaggcggcaggcctcatctgaccccaccctgggccactgccctgctccagagagtggaccttgactcttccacacctgcctatactcactaatgttaacacgtcatttcctttttgtatttttaaacaagaaagaaaaccccagtcctcatttgccttccctacctcttcctcccagagtcctccccacagttcctaagggccactgtgtacccgggctgtgtgggccagaactggggggctgagtcttccctggccccttggaagaggcccccagatgcccaggctcacttcagtgttgagtcctccattgaggatgcccactgaggcagccaggcccctcaccagccctggggggaatcctaaacagagagagaaaaagggtatctgcccttcttgccaggcagctccactctcccgctgactgcccacaccctgcagagtggcaggggtgaaaggaagaaggaagtggctgagttattaatagccagagccactgggagactggggagactggctgtaacccccttcacacctgggtttggcatcagcacagactacgggaggggctggctccctccccctcagaccctcacttcctgtacctagaggccattctggatgctgccatgttgggaagtacagtctctgcccattacctgcatgcaggcaccagagcagggactgagaaaccccaaggatgggtcatctaagtgctgtccatatgaaccctggactttctgtccttagatcctcacatgttatccctgtctttctggggtacgtttcaaactgaggaagctacaacacagtgaagacccaaggaaggcctatgaaatggtcctgatgcccaacctcccaccccttcaatgtggggacgagaccccctcatctcagagtaatgggaagaacctcccacatctccctggcagcagatgaggtggcttcacatgcacttccctgtctggacttcagcccgtattccgaggagtagagaggcagaagagatgtcagcaaagcaagtgatgaagcagagtggatgtccactgtcaccaagctggatggcaagctgcggcccacaaaacagccagtcaggttggctttcctggtttcagacatgctcataccattcccattttctcagcctcttctcactgcctccagagaggtgggtgcctgggttgagagacacagctgctacgtgatagatgttgagagacagaagccaacgaaggaggtcattcatcaacaaatatatttattggagaccgactttgtgcaaagcaatgctaatcagggttctccatggagcttccctcagctcttacctcacctccctccatttacattagggccttctcccagggtgtgctcggtgggcagtgtgggactgggggtgtgggagttggtgagagcaggaggagaggtggggacagcaagaagccacagattggcatgaaggatcctgacctgactatccatgccatccatggcccccagactgactctgcacctggccctttgccagacagctctgtctccccatgtcctctggaacagctgggcatgggtcatggccattcatgacccttaagtgccacccttcttggaagaccccctccagaagcatactggaagccacctctggaaaagcctcatatggtgatatgccaaaatatttatgtcaatgtccaaacaaagtccaatgccatgagactgaagtctttgtggaaaccactgttacagacaagcttatttccaaagccacctcatttccaaacatctcactcaggaagggaggctcaatgtaacctcaggggccagttttagcatttgaaatggttctgcttggaaaatgatgccctgcaactaaccctggtctttcccatggcaatttaaccacatttggaaggcactgccttcagctgagtttatgaacaatgaatgccaaccttcaggttctagaagattggttgcactcccaaacctttattctattatattactattaaaatattctaattttgctattgaaaaaaaaaa

SEQ ID NO: 106 - DNA, 1720 bp, Homo sapiens
  misc_feature: Incyte ID No: 1382894.10
gccatctttgcattgttcctcatccgcctccttgcccgccgcagtcgcctccgccgcgcgcctcctccgccgccgcggactccggcagctttatcgccagagtccctgaactctcgctttctttttaatcccctgcatcggatcaccggcgtgccccaccatgtcagacgcagccgtagacaccagctccgaaatcaccaccaaggacttaaaggagaagaaggaagttgtggaagaggcagaaaatggaagagacgcccctgctaacgggaatgctgtgagtgtctgctttgctcctgagccctggcagctaccgccccacaaaatttttcctgttctactttaaacatacctatatatgtgtgtgtatgtgtatatgtatagctttgcacagtggcagtatcgtagccaatgagctttacccgaggcgcgattattgctagttaaatatttataaaaacctttcgagcagcgcctgaacaagaataggttcagaggagactccggtagtctgagtttgggcttggcccagggtggggaaaagcccttgtcctggggcagttaatgtgcaggtttcatgatggagcctggagggtgttgactggagaagggtctctggggtgggcttggcttggctgggctgtagatgcagccgccagcctctggtgggaggccgggcatcaggagcaacgctctgtccagcctggggccagctggtaatgacatggcctgttttctgtcgaggagaatgaggaaaatggggagcaggaggctgacaatgaggtagacgaagaagaggaagaagttgtggaagaagaggaagagacgcccctgctaacgggaatgctaatgaggaaaatggggagcaggaggctgacaatgaggtagacgaagaagaggaagaaggtggggaggatagaggaggaggaagaagaaggtgatggtgaggaagaggatggagatgaagatgaggaagctgagtcagctacgggcaagcgggcagctgaagatgatgaggatgacgatgtcgataccaagaagcagaagaccgacgaggatgactagacagcaaaaaaggaaaagttaaactaaaaaaaaaaaaggccgccgtgacctattcaccctccacttcccgtctcagaatctaaacgtggtcaccttcgagtagagaggcccgcccgcccaccgtgggcagtgccacccgcagatgacacgcgctctccaccacccaacccaaaccatgagaatttgcaacaggggaggaaaaaagaaccaaaacttccaaggccctgctttttttcttaaaagtactttaaaaaggaaatttgtttgtattttttatttacattttatatttttgtacatattgttagggtcagccatttttaatgatctcggatgaccaaaccagccttcggagcgttctctgtcctacttctgactttacttgtggtgtgaccatgttcattataatctcaaaggagaaaaaaaaccttgtaaaaaaagcaaaaatgacaacagaaaaacaatcttattccgagcattccagtaacttttttgtgtatgtacttagctgtactataagtagttggtttgtatgagatggttaaaaaggccaaagataaaaggtttctttttttttccttttttgtctatgaagttgctgtttattttttttggcctgtttgatgtatgtgtgaaacaatcttatccacaataa

SEQ ID NO: 107 - DNA, 4706 bp, Homo sapiens
  misc_feature: Incyte ID No: 5496967CB1
gcctgtggctgtggctgcggctgcggctgcggctgagatttggccgggcgtccgcaggccgtgggggatgggggcagcgagctccagccctcggcggtggcggcggccgtaggtgtggggcgggcgtccgcgtccggcacgcgagatggagcgccgtggatttcagtttttctgactgttacatgaaaggatgattgctcacaaacagaaaaagacaaagaaaaaacgtgcttgggcatcaggtcaactctctactgatattacaacttctgaaatggggctcaagtccttaagttccaactctatttttgatccggattacatcaaggagttggtgaatgatatcaggaagttctcccacatgttactatatttgaaagaagccatattttcagactgttttaaagaagttattcatatacgtctagaggaactgctccgtgttttaaagtctataatgaataaacatcagaacctcaattctgttgatcttcaaaatgctgcagaaatgctcactgcaaaagtgaaagctgtgaacttcacagaagttaatgaagaaaacaaaaacgatctcttccaggaagtgttttcttctattgaaactttggcatttacctttggaaatatccttacaaacttccttatgggagatgtaggcaatgattcattcttgcgactgcctgtttctcgagaaactaagtcgtttgaaaatgtttctgtggaatcagtggactcatccagtgaaaaaggaaatttttcccctttagaactagacaacgtgctgttaaagaacactgactctatcgagctggctttgtcatatgctaaaacttggtcaaaatatactaagaacatagtttcatgggttgaaaaaaagcttaacttggaattggagtccactagaaatatggtcaagttggcagaggcaactagaactaacattggaattcaggagttcatgccactgcagtctctgtttactaatgctcttcttaatgatatagaaagcagtcaccttttacaacaaacaattgcagctctccaggctaacaaatttgtgcagcctctacttggaaggaaaaatgaaatggaaaaacaaaggaaagaaataaaagagctttggaaacaggagcaaaataaaatgcttgaagcagagaatgctctcaaaaaggcaaaattattatgcatgcaacgtcaagatgaatatgagaaagcaaagtcttccatgtttcgtgcagaagaggagcatctgtcttcaagtggcggattagcaaaaaatctcaacaagcaactagaaaaaaagcgaaggttggaagaggaggctctccaaaaagtagaagaagcaaatgaactttacaaagtttgtgtgacaaatgttgaagaaagaagaaatgatctagaaaataccaaaagagaaattttagcacaactccggacacttgttttccagtgtgatcttacccttaaagctgtaacagttaacctcttccacatgcagcatctgcaggctgcttcccttgcagacagtttacagtctctctgtgatagtgccaaactctatgacccaggccaagagtacagtgaatttgtcaaggccacaaattcaactgaagaagaaaaagttgatggaaatgtaaataaacatttaaatagttcccaaccttcaggatttggacctgccaactctttagaggatgttgtacgccttcctgacagttctaataaaattgaagaggacagatgctctaacagtgcagatataacaggtccttcctttataagatcatggacatttgggatgtttagtgattctgagagcactggagggagcagcgaatctagatctctggattcagaatctataagtccaggagactttcatcgaaaacttccacgaacaccatccagtggaactatgtcctctgcagatgatctagatgaaagagagccaccttccccttcagaaactggacccaattcccttggaacatttaagaaaacattgatgtcaaaggcagctctcacacacaagtttcgcaaattgagatcccccacgaaatgtagggattgtgaaggcattgtagtgttccaaggtgttgaatgtgaagagtgtctccttgtttgtcatcgaaagtgtttggaaaatttagtcattatttgtggtcatcagaaacttccaggaaaaatacacttatttggagcagaattcacacaagttgcaaaaaaggaaccagatggtatcccttttatactcaaaatatgtgcctcagagattgaaaatagagctttgtgtctacagggaatttatcgtgtgtgtggaaacaaaataaaaactgaaaaattgtgtcaagctttggaaaatggaatgcacttggtagatatttcagaatttagttcacatgatatctgtgacgtcttgaaattataccttcggcagctcccagaaccatttattttatttcgattgtacaaggaatttatagaccttgcaaaagagatccaacatgtaaatgaagaacaagaggcaaaaaagaatagtcttgaagacaaaaaatggccaaatatgtgtatagaaataaaccgaattcttctaaaaagcaaagaccttctaagacaattgccagcatcaaattttaacagtcttcatttccttatagtacatctaaagcgggtagtagatcatgcagaagaaaacaagatgaactccaaaaacttgggggtgatatttggaccaagtctcattaggccaaggcccacaactgctcctatcaccatctcctcccttgcagagtattcaaatcaagcacgcttggtagagtttctcattacttactcacagaagatcttcgatgggtccctacaaccacaagatgttatgtgtagcataggtgttgttgatcaaggctgttttccaaagcctctgttatcaccagaagaaagagacattgaacgttccatgaagtcactatttttttcttcaaaggaagatatccatacttcagagagtgaaagcaaaatttttgaacgagctacatcatttgaggaatcagaacacaagcaaaatgcgttaggaaaatgtgatgcatgtctcagtgacaaagcacagttgcttctagaccaagaggctgaatcagcatcccaaaagatagaagatggtaaaacccctaagccactttctctgaaatctgataggtcaacaaacaatgtggagaggcatactccaaggaccaagattagacctgtaagtttgcctgtagatagactacttcttgcaagtcctcctaatgagagaaatggcagaaatatgggaaatgtaaatttagacaagttttgcaagaatcctgcctttgaaggagttaatagaaaagacgctgctactactgtttgttccaaatttaatggctttgaccagcaaactctacagaaaattcaggacaaacagtatgaacaaaacagcctaactgccaagactacaatgatcatgcccagtgcactccaggaaaaaggagtgacaacaagcctccagattagtggggaccattctatcaatgccactcaacccagtaagccatatgcagagccagtcaggtcagtgagagaggcatctgagagacggtcttcagattcctaccctctcgctcctgtcagagcacccagaacactgcagcctcaacattggacaacattttataaaccacatgctcccatcatcagtatcagggggaatgaggagaagccagcttcaccctcagcagcagtgcctcctggcacagatcacgatccccacggtctcgtggtgaagtcaatgccagacccagacaaagcatcagcttgtcctgggcaagcaactggtcaacctaaagaagactctgaggagcttggcttgcctgatgtgaatccaatgtgtcagagaccaaggctaaaacgaatgcaacagtttgaagacctcgaagatgaaattccacaatttgtgtagggatgtcaaatttcagggtttttttgttgttgttgtgttattttgtggtattgtgcttgttttgtgaaagaatgttttgacagggccccttttgtataggactgccaaatcatgggttttgccttttgttgttgtatttatcctctgttggtaatactgaatggtagaatgttttgatagggtcacatttgtgcctcactggaattatctttaaattctgtatttttaaagttgtgaataagataggtggattcgtattttttaaagttcagttgactttccccaccaaatggtccatttgaatgcatccctaatatatgatatagtctcaactaataggtgcaatttgggaaaatcaggtttattttttggagtggaactgttataagtgcttatttataaaaggaatgtttctgaatgcaagtgcctaaaaagatctttgttggtatgcatatgttttgtcacacaattttatagtgcatctttcaccatttgtgcttttttaagatacgtatgtaagctcttatttttcaattggcaattcagttaatttttaaatgtttacataatggccagaaggcttgcaaatctgtatttaattgcattttaattaattgccagtttttacatgtgatagtcagttgtacaaagaaaatgcacttaaacctgtttctaaattatatattcagttatattatatttggctttagatgattttaatacatttgaa

SEQ ID NO: 108 - DNA, 1996 bp, Homo sapiens
  misc_feature: Incyte ID No: 482336.40
ctcgacagctctctcgcccagcccagttctggaggggataaaaagggggcatcaccgttcctgggtaacagagccaccttctgcgtcctgctgagctctgttctctccagcacctcccaacccactagtgcctggttctcttgctccaccaggaacaagccaccatgtctcgccagtcaagtgtgtccttccggagcgggggcagtcgtagcttcagcaccgcctctgccatcaccccgtctgtctcccgcaccagcttcacctccgtgtcccggtccgggggtggctctggtggtggcttcggcagggtcagccttgcgggtgcttgtggagtgggtggctatggcagccggagcctctacaacctggggggctccaagaggatatccatcagcactagtggtggcagcttcaggaaccggtttggtgctggtgctggaggcggctatggctttggaggtggtgccggtagtggatttggtttcggcggtggagctggtggtggctttgggctcggtggcggagctggctttggaggtggcttcggtggccctggctttcctgtctgccctcctggaggtatccaagaggtcactgtcaaccagagtctcctgactcccctcaacctgcaaatcgaccccagcatccagagggtgaggaccgaggagcgcgagcagatcaagaccctcaacaataagtttgcctccttcatcgacaaggtgcggttcctggagcagcagaacaagctgctggagaccaagtggacgctgctgcaggagcagaagtcggccaagagcagccgcctcccagacatctttgaggcccagattgctggccttcggggtcagcttgaggcactgcaggtggatgggggccgcctggaggcggagctgcggagcatgcaggatgtggtggaggacttcaagaataagtacgaagatgaaattaaccgccgcacagctgctgagaatgagtttgtggtgctgaagaaggatgtggatgctgcctacatgagcaaggtggagctggaggccaaggtggatgccctgaatgatgagatcaacttcctcaggaccctcaatgagacggagttgacagagctgcagtcccagatctccgacacatctgtggtgctgtccatggacaacagtcgctccctggacctggacggcatcatcgctgaggtcaaggcgcagtatgaggagatggccaaatgcagccgggctgaggctgaagcctggtaccagaccaagtttgagaccctccaggcccaggctgggaagcatggggacgacctccggaatacccggaatgagatttcagagatgaaccgggccatccagaggctgcaggctgagatcgacaacatcaagaaccagcgtgccaagttggaggccgccattgccgaggctgaggagcgtggggagctggcgctcaaggatgctcgtgccaagcaggaggagctggaagccgccctgcagcgggccaagcaggatatggcacggcagctgcgtgagtaccaggaactcatgagcgtgaagctggccctggacatcgagatcgccacctaccgcaagctgctggagggcgaggagagccggttggctggagatggagtgggagccgtgaatatctctgtgatgaattccactggtggcagtagcagtggcggtggcattgggctgaccctcgggggaaccatgggcagcaatgccctgagcttctccagcagtgcgggtcctgggctcctgaaggcttattccatccggaccgcatccgccagtcgcaggagtgcccgcgactgagccgcctcccaccactccactcctccagccaccacccacaatcacaagaagattcccacccctgcctcccatgcctggtcccaagacagtgagacagtctggaaagtgatgtcagaatagcttccaataaagcagcctcattctgaggcctgagtgatccaaaaaaaaagccgctctagactcgagactag

SEQ ID NO: 109 - DNA, 458 bp, Homo sapiens
  misc_feature: Incyte ID No: 236624.1
  unsure 439: a, t, c, g, or other
gaattcgctttaacagtcaacactcttctttttttatttttttgttaagttcaaaagctggtggtgtaggacttaacctcattggaggatctcacttaattctctatgacattgattggaatccagccactgacattcaggtacaatagaagaaaagatctatcaaaggcagatcagtaagcaaggtctttgtggggcagttgtcgacctcaccaagacatctgaacatattcagttttcagtagaagaacttaaaaatttgttcacattacatgaaagttcagattgtgttactcatgatctgcttgactgtgagtgtacaggagaagaagttcatacaggtgatcgttggaaaaattcattgtctctagagattgtcagcttgggccacatcaccagaaatctaactccctgaaactctttctatggtcccagctgnagcaatgggaacatttttc

SEQ ID NO: 110 - DNA, 1271 bp, Homo sapiens
  misc_feature: Incyte ID No: 1521123CB1
caaatcggtggaggacggctggggtccggccccgggagggggcggggcgcgtttaagagctgcgggccgggtgcggacggcggaggcggcgggactggtccctgcagctcttcagtgggtcatctgtgtgtcacagcctcagaagaccagcgagatggctgccaacaagagtaagggccagagctccttggccctccacaaggtgatcatggttggcagcggaggcgttggcaagtcagccctgacgcttcagttcatgtatgacgagtttgtagaagactatgaacctaccaaagctgacagttatagaaagaaagtggttcttgatggggaagaagttcagatagatattctggacaccgctgggcaagaggactacgcagccattcgagataactactttcggagtggggaagggtttcttcttgtgttctcaatcacagaacatgaatcctttacagcaactgccgaattcagggaacagattctccgtgtgaaggctgaagaagataaaattccactgctcgtcgtgggaaacaagtctgacctagaggagcggaggcaggtgcctgtggaggaggccaggagtaaagccgaagagtggggcgtgcagtacgtggagacgtcagcgaagacccgggccaacgtggacaaggtgttctttgacctaatgagagaaatcagaacaaagaagatgtcagaaaacaaagacaagaatggcaagaaaagcagcaagaacaagaaaagttttaaagaaagatgttgcttactatgagtgtcaaggtgacggatgaagccagctgctcctaaggacacagggctgggttggtaaagagaaggctatggttgacttcttgcttgtgcttcccactctccccgacttcattcactcaaacttctttaaatggggaaaaatatttgtgactcagtggctggcagaagaaataagcccatgcaagtggaagggctgctttgtcaggaggttgtggaatttctttcttctccccttcttccctcccaaaagcttagctatgtataaagtgccacagataggaaacagctgttaattacaaagagaaagaattgtcatagcatcttattttgttcctagttttataacattaccatccttcgttttgaactacagatgttgtagtgggttttggaggagggagtggagtaagatgccctcccacttttatcagtttagtagtagtactgagaaaaatcccttcagctctaagaacactgaaaaatccaccgattttttg

SEQ ID NO: 111 - DNA, 1191 bp, Homo sapiens
  misc_feature: Incyte ID No: 2723340CB1
caatgacaaatcggtggaggacggctggggtccggccccgggagggggcggggcgcgtttaagagctgcgggccgggtgcggacggcggaggcggcgggactggtccctgcagctcttcagtgggtcatctgtgtgtcacagcctcagaagaccagcgagatggctgccaacaagagtaagggccagagctccttggccctccacaaggtgatcatggttggcagcggaggcgttggcaagtcagccctgacgcttcagttcatgtatgacgagtttgtagaagactatgaacctaccaaagctgacagttatagaaagaaagtggttcttgatggggaagaagttcagatagatattctggacaccgctgggcaagaggactacgcagccattcgagataactactttcggagtggggaagggtttcttcttgtgttctcaatcacagaacatgaatcctttacagcaactgccgaattcagggaacagattctccgtgtgaaggctgaagaagataaaattccactgctcgtcgtgggaaacaagtctgacctagaggagcggaggcaggtgcctgtggaggaggccaggagtaaagccgaagagtggggcgtgcagtacgtggagacgtctagtgagcctcttgctaagtgtcacacacactcttcccaaagacgtgatgagttaaagttgtattctgaaatcatgaagccagagcctgtgccagaccttctgctacctctcatagaattgctctgtaattctaaatttaaaattagaagtagagagagataagccatcgcccctttgcctctgagaattggctgctgtttctaatataattattttctaagatagccagatagttagaaaaagattttcattgatgacatatctttaaactttcttgcatcagtattctaaattgagcaaactgaaagattttcatcaggaaaggagcactgtgggaagagcccagtattcacattttttccccatttttcagaagcgacatttcatatataggtgccaaaagtgaatcggggtgcggagagtgggaaccttttgaatttatgattgtcacagagatggtagaaattatgatctgactggaaaacaatcctgtatcccctcccaaagaatcatgggctttttttttgaataaaaaagcagacaaatagaaaaaaaaa

SEQ ID NO: 112 - DNA, 476 bp, Homo sapiens
  misc_feature: Incyte ID No: 023064.1
aaaacggaaggaaacatcagccttgggggccacagactcaacatgtgtgtgtggtggggttccagcccaacatagagtaacattatttgtacctcccaggctagctcagtccatgggaggctctcctgtccctgaaagctgacacccacctttcaccacttcgcccatgctacagttcagtttcctcgtctgtaaaatggggatgataatggtacctaccttgcagtgttgttataaggattaaaggagacagtgcaagaaaaggccttggttggtgaagagcccaacctcggaggggagctgctgggatcctccttatcttgactgggatgtccctgtctccccctccccttgctccttgaacatggccaaggaaagtgaaaaacaaaaattattcactctgctagcacccttccccttgatgcctgggaataggttttgccaataaacgtatctgtgttggagtggcaaaaaaa

SEQ ID NO: 113 - DNA, 3165 bp, Homo sapiens
  misc_feature: Incyte ID No: 1290877CB1
  unsure 3157: a, t, c, g, or other
cttggaccatgtataatatgatgcttctaatccaaaagaggaaaggcattgggagtcagctccgtagagggctcggagaggcagagggagacagaggagctggtactgcagagcggtcgtctgattggctggacggtcgtagctgggctataaaagagacccctacaggcttagcaggaagacgctcagaggattctgacaatatctttaccggagaagaggcaaagtacgctcaaagccgaagccacagctcctcctgccgcatttctttcctgcttgcgaattccaagctgttaaataagatgtgcaaagggcttgcaggtctgccggcttcttgcttgaggagtgcaaaagatatgaaacatcggctaggtttcctgctgcaaaaatctgattcctgtgaacacaattcttcccacaacaagaaggacaaagtggttatttgccagagagtgagccaagaggaagtcaagaaatgggctgaatcactggaaaacctgattagtcatgaatgtgggctggcagctttcaaagctttcttgaagtctgaatatagtgaggagaatattgacttctggatcagctgtgaagagtacaagaaaatcaaatcaccatctaaactaagtcccaaggccaaaaagatctataatgaattcatctcagtccaggcaaccaaagaggtgaacctggattcttgcaccagggaagagacaagccggaacatgctagagcctacaataacctgctttgatgaggcccagaagaagattttcaacctgatggagaaggattcctaccgccgcttcctcaagtctcgattctatcttgatttggtcaacccgtccagctgtggggcagaaaagcagaaaggagccaagagttcagcagactgtgcttccctggtccctcagtgtgcctaattctcacctgaaggcagagggatgaaatgccaagactctatgctctggaaaacctgaggccaaatattgatctgtattaagctccagtgctttatccacattgtagcctaatattcatgctgcctgccatgtgtgagtcacttctacgcataaactagatatagcttttggtgtttgagtgttcatcagggtgggaccccattccagtccaattttcctaagtttctttgagggttccatgggagcaaatatctaaataatggcctggtaggtctggattttcaaagattgttggcagtttcctcctcccaacagttttacctcgggatggttggttagtgcatgtcacatgacatccacatgcacatgtattctgttggccagcacgttctccagactctagatgtttagatgaggttgagctatgatatgtgcttgtgtgtatgtctatgtgtatatattatatatacattagacacacatatacattatttctgtatatagatgtctgtgtatacatatgtatgtgtgagtgtatgtatacacacacacacacacacacacacttttgcaagagtgatgggaaagaccctaggtgctcataactagagtatgtgtatgtacttacatgggtgttttgatctctgttctttcatactacatttgaacagggcaaaatgaactaactgccatgtaggctaagaaagaaatgctaacctgtggaaagttggttttgtaaaattccatggatcttgctggagaagcatccaaggaacttcatgcttgatttgaccactgacagcctccaccttgagcactattctaaggagcaaataccttagctcccttgagctggttttctctgatggcacttttgagctcctaagctgccagccttcccttcttttcctgggtgctcagggcatgcttattagcagctgggttggtatggagttggcagacaggatgttcaacttaatgaagaaatacagctaaggccttgccagcaacacctgccgtaagttactggctgagtgagggcatagaagttaaaggttactgtttttatcctctatccttttttcctttcctgatcaaggtgctcttctcattttttcctgagaaccttagccatcagatgaggctccttagtttattgtggttggttgttttttctttataatggctctgggctatatgcccatatttataaaccagcagcaggggaaagattatattttataagagggaacaaattttcacaatttgaaaagcccacataagttttctcttttaaggtagaatcttgttaatttcattccaaacatcggggctaacagagactggaggcatttctttttaggctctgagactaaatgagaggaaaagaaaagaaaaaaaaatgattgtctaaccaattgtgagaattactgtttgaaacttttcaaggcacattgaaatacttgaaaacttctcatttatgttatttatgatgttattttgtacgtgttattattattatattgttttataaatggaggtacaggatatcacctgaattattaatgaatgcccaggaagtaattttcttctcattcttctaaaactactgcctttcaaagtgcacacacacgcgtccacatacactgcattcgttgctccagtataaattacatgcatgagcacctttctggcttttaagccaatataatgggctgcaaaatgaagacaccagagtgtatgcatacaaatctcactgtattaaagatgcaggttttctaattgtacccttcttgtctctctggcaatcttgcccttaatatccctggagttcctcatcagtgtcattttctgttatacacagttccacaattttgtctctagttgacttcaaatgtgtaactttattggtcttgccctattataattgtcatgactttcagattgtatctgaactcacagactgctgtcttactaataggtctggaaggtcacgctgaatgagaagtaaattattttatgtaatacatttttgagtgtgtttttcagttgtatttccctgttatttcatcactatttccaatggtgagcttgcctgctcatgctccctggacagaatactccttccttttgcatgcctgtttctatcatgtgcttgataggcctcaaagctaatgcttccagtgaaacacacgcatcttaataataagggtaaataaacgctcctatgaaactanaaaaaaaa

SEQ ID NO: 114 - DNA, 872 bp, Homo sapiens
  misc_feature: Incyte ID No: 1796035CB1
tgctcctcccacccttttcctcttggaagccaaacccctttgtaatctgtataaggtccacaccccgggagctgagtgattgcagaaactggccttccatctctctcagacaccaagctgcagatccaggcttttctgggaaagtgaggccaccatggctctggagaagtctcttgtccggctccttctgcttgtcctgatactgctggtgctgggctgggtccagccttccctgggcaaggaatcccgggccaagaaattccagcggcagcatatggactcagacagttcccccagcagcagctccacctactgtaaccaaatgatgaggcgccggaatatgacacaggggcggtgcaaaccagtgaacacctttgtgcacgagcccctggtagatgtccagaatgtctgtttccaggaaaaggtcacctgcaagaacgggcagggcaactgctacaagagcaactccagcatgcacatcacagactgccgcctgacaaacggctccaggtaccccaactgtgcataccggaccagcccgaaggagagacacatcattgtggcctgtgaagggagcccatatgtgccagtccactttgatgcttctgtggaggactctacctaaggtcagagcagcgagataccccacctccctcaacctcatcctctccacagctgcctcttccctcttccttccctgctgtgaaagaagtaactacagttagggctcctattcaacacacacatgcttccctttcctgagtcccatccctgcgtgattttgggggtgaagagtgggttgtgaggtgggccccatgttaacccctccactctttctttcaataaaacgcagttgcaaacaaaaaaaaaaa

SEQ ID NO: 115 - DNA, 655 bp, Homo sapiens
  misc_feature: Incyte ID No: 5037270CB1
gaggccaagaattcggcacgagggctcggaggaggccaaggtgcaacttccttcggtcgtcccgaatccgggttcatccgacaccagccgcctccaccatgccgccgaagttcgaccccaacgagatcaaagtcgtatacctgaggtgcaccggaggtgaagtcggtgccacttctgccctggcccccaagatcggccccctgggtctgtctccaaaaaaagttggtgatgacattgccaaggcaacgggtgactggaagggcctgaggattacagtgaaactgaccattcagaacagacaggcccagattgaggtggtgccttctgcctctgccctgatcatcaaagccctcaaggaaccaccaagagacagaaagaaacagaaaaacattaaacacagtgggaatatcacttttgatgagattgtcaacattgctcgacagatgcggcaccgatccttagccagagaactctctggaaccattaaagagatcctggggactgcccagtcagtgggctgtaatgttgatggccgccatcctcatgacatcatcgatgacatcaacagtggtgctgtggaatgcccagccagttaagcacaaaggaaaacatttcaataaaggatcatttgacaactggtaaaaaaaaaaaaaaa

SEQ ID NO: 116 - DNA, 907 bp, Homo sapiens
  misc_feature: Incyte ID No: 1398670.1
ggtaggtgtttcgtttcttgcctcctcttccttgccggcggagacccctaagctgtattcccattgcccctagtcatccactccctaccatggtcggggcttccaggctgcgcatggccgcctgcggggcagggtggccggcgcgggcccggggcggggctcccggagccgtgtgttaggcccgcggttcggatctctaggacacgcgggcccctgcgctaccgtggtgagacctcacggtcctgagcggatcggtaccctcagctttcccaaacgctccagaagttaggtctttgacccacaggcttacaggaccatctcggctggcgggcatcgccccctgcccctaattccttaggccttaccagcaagctttttccacacagccatccagactgaggaagacccggaaacttaggggccacgtgagccacggccacggccgcataggcaagcaccggaagcaccccggcggccgcggtaatgctggtggtctgcatcaccaccggatcaacttcgacaaataccacccaggctactttgggaaagttggtatgaagcattaccacttaaagaggaaccagagcttctgcccaactgtcaaccttgacaaattgtggactttggtcagtgaacagacacgggtgaatgctgctaaaaacaagacgggggctgctcccatcattgatgtggtgcgatcgggctactacaaagttctgggaaagggaaagctcccaaagcagcctgtcatcgtgaaggccaaattcttcagcagaagagctgaggagaagattaagagtgttgggggggcctgtgtcctggtggcttgaagccacatggagggagtttcattaaatgctaactacttttccaaaaaaaaaaaaaagcgccgctcgcgatctagaac

SEQ ID NO: 117 - DNA, 2232 bp, Homo sapiens
  misc_feature: Incyte ID No: 239652.37
gaccaagtaaactccagtgaaaggaagccagatcttcatcaggcagaatgtgatttcctaagagagcagctcaaaataggaaaacgatttggattcaggtccagttgcttggcaacttcatgcatcagatattggcttgtggtgagacttttcccgttccggctcagttttagggcatgggcactgaaatagtaggggatgttgccacggccacggccgcataggcaagcaccggaagcaccccggcggccgcggtaatgctggtggtctgcatcaccaccggatcaacttcgacaaataccacccaggctactttgggaaagttggtatgaagcattaccacttaaagaggaaccagagcttctgcccaactgtcaaccttgacaaattgtggactttggtcagtgaacagacacgggtgaatgctgctaaaaacaagactggggctgctcccatcattgatgtggtgcgatcgggctactataaagttctgggaaagggaaagctcccaaagcagcctgtcatcgtgaaggccaaattcttcagcagaagagctgaggagaagattaagagtgttgggggggcctgtgtcctggtggcttgaagccacatggacacaggcccccccaacactcttaatcttctcctcagctcttctgctgaagaatttggccttcacgatgacaggctgctttgggagctttccctttcccagaactttgtagtagccctagaagaacagagaaaaaagtttacaatacactgtagtaggtaccaactgcgtgatgggcgtgaggaaagactgccaacccactttctaaatccctaggcagggtatgtatgtttctgatctgggcactaacgggggcaccgactgcccccaccagtgaatcaagaccagtagattctcttcgagtactctagcacaccaggacaagagttgtgtcaggatgtgactctagtctcggcaaagcataagcctcctcctgctcaaataccccctgctaagcaaaagaagacaaccaccttcctgaccaccagaactactcaatggacattaaataggctgggaagtgaatttaaagcgtccctagggttctggcctcttaacactacctctatattcatgagagttaagactgacacagggaccagaacccccgcaaggacagacataatacatctgttttgggggaaaatctcttcagataatgcatggcactgagtatcaatggaacatattaggattctattatctggagaacatgaagggccaagagctgtgctcagtgaaaaccagctatagttcaagcacgaaatgcaaacctgatacaacctgggcagtgacagtaggcactgctacggatagggaactacctatgataattctaccacaggaagaatatcaatgtctggtaggtaactgggaagtacagattatataagtggattagattaagccagagttttgtaagggaaggtatggaagtacagaaaaacatccaattaacttaccgatcgcaccacatcaatgatgggagcagccccagtcttgtttttagcagcattcacccgtgtctgttcactgaccaaagtccacaatttgtcaaggttgacagttgggcagaagctctggttcctctttaagtggtaatgcttcataccaactttcccaaagtagcctgggtggtatttgtcgaagttgatccggtggtgatgcagaccaccagcattactgcggccgccggggtgcttccggtgcttgcctatgcggccgtggccgtggctcacgtggcccctaagtttccgggtcttcctcagtctggatggctgtgtggaaaaagcttggtggtaaggcctaaggaattaggggcagggggcgatgcccgccaagccgagatggtcctgtaagcctgtgggtcaaagacctaacttcttggagcgtttgggaaagctgagggtacccgatccgctcagggccgtgaggtctcaccacggtagcgcaggggcccggcgtgtcctagagatccgaaccgcgggcctaaccacacagcatccgggagccccgccccgggcccgcgccggccaccctgcccccgcacggcggccatgcgcagcctggaagccccgaccatggtagggagtggatgactaggggcaatgggaatacagcttaggggtctccgccggcaaggaagaggaggcaagaaacgaaacacctaccatgttggc

SEQ ID NO: 118 - DNA, 847 bp, Homo sapiens
  misc_feature: Incyte ID No: 4906154CB1
caaatggcggatgacgccggtgcagcgggggggcccgggggccctggtggccctgggatggggccggaggaaggccgaggataaggagtggatgcccgtcaccaagttgggccgcttggtcaaggacatgaagatcaagtccctggaggagatctatctcttctccctgcccattaaggaatcagagatcattgatttcttcctgggggcctctctcaaggatgaggttttgaagattatgccagtgcagaagcagacccgtgccggccagcgcaccaggttcaaggcatttgttgctatcggggactacaatggccacgtcggtctgggtgttaagtgctccaaggaggtggccaccgccatccgtggggccatcatcctggccaagctctccatcgtccccgtgcgcagaggctactgggggaacaagatcggcaagccccacactgtcccttgcaaggtgacaggccgctgcggctctgtgctggtacgcctcatccctgcacccaggggcactggcatcgtctccgcacctgtgcctaagaagctgctcatgatggctggtatcgatgactgctacacctcagcccggggctgcactgccaccctgggcaacttcgccaaggccacctttgatgccatttctaagacctacagctacctgacccccgacctctggaaggagactgtattcaccaagtctccctatcaggagttcactgaccacctcgtcaagacccacaccagagtctccgtgcagcggactcaggctccagctgtggctacaacatagggtttttatacaagaaaaataaagtgaattaagcgtgttaaaaaaaaaaaaaaa

SEQ ID NO: 119 - DNA, 6176 bp, Homo sapiens
  misc_feature: Incyte ID No: 282397.77
gcgggcgccggctgagccagcggctcttgggaggctgcgtccgcgcgccggcggggcgaggcggccgggccctgcgcgtcaggcctgagacctgggaggaagctggagaaaagatgccctctgaatctttgtgtttggctgcccaggctcgcctcgactccaaatggttgaaaacagatatacagcttttgtctggtcctctgagccccagtgagagtttcctgaggtacctcacccttccacaagacaacaggcttgccattgatctgcaacaaacggcggttgttgtcatggcccatttagaccgtctggctacaccctgtagatgcctcctctgtgtagctctccgacgtctcataagagtcattttttacaggtcagaactgtagaaataatgagaaagtgacatttgtacgcatagctgatttggagaaccataataacgatggaggcttctggactgtgattgacgggaaagtgtatgatataaaggacttccagacacagtcgttaacagaaaatagtattcttgctcagtttgcaggggaagacccagtggtagctttggaagctgctttgcagtttgaagacacccgggaatccatgcacgcattttgtgttggccagtatttggagcctgaccaagaaggcgtcaccataccagatctggggagtctctcctcacctctgatagacacagagaggaatctgggcctgcttctcggattacacgcttcctatttagcaatgagcacaccgctgtctcctgtcgagattgaatgtgccaaatggcttcagtcatccatcttctctggaggcctgcagaccagccagatccactacagctacaacgaggagaaagacgaggaccactgcagctccccagggggcacacctgccagcaaatctcgactctgctcccacagacgggccctgggggaccattcccaggcatttctgcaagccattgcagacaacaacattcaggatcacaacgtgaaggactttttgtgtcaaatagaaaggtactgtaggcagtgccatttgaccacaccgatcatgtttccccccgagcatcccgtggaagaggtcggtcgcttgctgttatgttgcctcttaaaacatgaagatttaggtcatgtggcattatctttagttcatgcaggtgcacttgatattgagcaagtaaagcacagaacgttgcctaagtcagtggtggatgtttgtagagttgtctaccaagcaaaatgttcgctcattaagactcatcaagaacagggccgttcttacaaggaggtctgcgctcctgtcatcaaacgtttgagattcctctttaatgaattgagacctgctgtttgtaatgacctctctataatgtctaagtttaaattgttaagttctttgccccattggaggaggatagctcagaagataattcgagaaccaaggaaaaagagagttcctaagaagccagaatctacggatgatgaagaaaaaattggaaacgaagagagtgatttagaagaagcttgcattttgcctcatagtccaataaatgtggacaagagacccattgcaattaaatcacccaaggacaaatggcagccgctgttgagtactgttacagatgttcacaaatacaagtggttgaagcagaatgtgcagggtctttatccgcagtctccactcctcagtacaattgctgaatttgcccttaaagaagagccagtggatgtggaaaagagaaagtgcctactaaaacagttggagagagcagaggttcgcctggaagggatagatacaattttaaaattgtatctggtgagcaagaatttcttacttccatctgtgccgtatgcgatgttttgtggatggcaaagacttattcctgagggaatcgatataggggaacctcttactgattgtttaaaggatgttgatttgatcccgccttttaatcggatgctgctggaagtcacctttggcaagctgtacgcttgggctgttcagaacattcgaaatgttttggtggatgccagtgccaaatttaaagagcttggtatccagccggttcccctgcaaaccatcaccaatgagaacccatcgggaccgagcctggggaccatcccgcaagcccacttcctcctggtgatgctcagcatgctcaccctgcagcacagcgcaaacaaccttgacctcctgctcaattccggcacgctggccctcgctcagacggcactgcgcctgattggccccagttgtgacagcgttgaggaagatatgaatgcttctgcccaaggtgcttctgccacagttttggaagaaacaaggaaggaaacggctcctgtgcagctccctgtttcagggccagaactggctgccatgatgaagattggaacaagggtcatgagaggtgtggactggaaatggggcgatcaggatgggcctcctccaggcctaggccgagtgattggtgagctgggagaggacgggtggataagagtccagtgggacacaggcagcaccaactcctacaggatggggaaagaaggaaaatacgacctcaagctggcagagctgccagcccctgcacagccctcagcagaggattcggacacagaggacgactctgaagccgaacaaactgaaaggaacattcaccccactgcaatgatgtttaccagcactattaacttactgcagactctttgtctgtctgctggagttcatgctgagatcatgcagagtgaagccaccaagactttatgcggactgctgcgaatgttagtggaaagcggaacgacggacaagacatcttctccaaacaggctggtgtacagggagcaacaccggagctggtgcacgctggggtttgtgcagagcatcgctctcacgctgcaggtgtgcggcgccctcagctccccgcagtggatcacgctgctcatgaaggttgtggaagggcacgcacccttcactgccacctcgctgcagaggcagatcttagctgtgcatttgttgcaagcagtccttccgtcatgggacaagaccgaaagggtgagggacatgaaatgcctcatggagaagctgtttgacttcttggggagcttgctcactatgtgctcctctgacgtgccgttactcagaggtgggtggccgtctcccttccctgtaccctggtgaagagcggtgcagtgccgtcactcagaggtgggtggccgtctcccttccctgtgtcctggtgaagagcggtgcagtgccgtcactcagaggtgggtggccgtctcccttccctgtaccctggtgaagagcggtgcagtgccgtcactcagaggtgggtggccgtctcccttccctgtgtcctggtgaagagccgtgtagtgccgtcactcagaggtgagtggccgtctcccttccctgtgccctggtgaagagtggtgcagcagcttctcccctggtttcctcctcagagtccacgctgaggcggcgcagggtgtgcccgcaggcctcgctgactgccacccacagcagcacactggcggaggaggtggtggcactgctgcacacgctgcactccctgactcggtggaatgggctcatcaacaagtacatcaactcccagctccgctccatcacccacagctttgcgggaaggccttccaaaggggcccagttagatgactacttccctgattccgagaaccctgaagtggggggcctcatggcggtcctggctgtggttggaggcatcgatggtcgcctgtgcctgggcggccaagttgtgcacgatgactttggagaagtcaccatgactcgcatcaccctgaagggcaaaatcaccgtgcagttctctgacatgcggacgtgtcgcgtttgcccattgaatcagctgaaaccactccctgccgtggcctttaatgtgaacaacctgcccttcacagagcccatgctgtctgtctgggctcagttggtgaacctcgctggaagcaagttagaaaagcacaaaataaagaaatcgactaaacaggcctttgcaggacaagtggacctggacctgctgcggcgccagcagttgaagctatacatcctgaaagcaggtcgggcgctgttctcccaccaggataaactgcggcagatcctgtctcagccagctgttcaggagactggaactgttcacacagatgatggagcagtggtatcacctgaccttggggacatgtctcctgaagggccgcagccccccatgatcctcttgcagcagctgctggcctcggccacccagccgtctcctgtgaaggccatatttgataaacaggaacttgagactgctgcactggccgttgtggagtccactcacccttcgagcccaggatttgaagactgcagctccagtgaggccaccacgcctgtcaacgtgcagcacatccgccctgccagagtgaagaggcgcaagcagtcacccgttcccgctctgccgatcgtggtgcagctcatggagatgggatttcccagaaggaacatcgagtttgccctgaagtctctcactggtgcttccgggaatgcgtccggcttgcctggtgtggaagccttggtcgggtggctgctggaccactccgacatacaggtcacggagctctcagatgcagacacggtgtccgacgagtattctgacgaggaggtggtggaggacatggatgatgccgcctactccatgtctactggtgctgttgtgacggagagccagacgtacaaaaaccgagctggtttcttgggtaatgatgattatgctgtatatgtgagagagaatattcaggtgggaatgatggttagatgctgccgaacatacgaagaagtgtgcgaaggtgatgtgatgttggcaaagtcatcaagctggacagagatggattgcatgatctcaatgtgcagtgtgactggcagcagaaagggggcatctactggtttaggtacattcatgtggaacttataggctatcctccaccaagaagttcttctcacatcaagattggtgataaagtgcgggtcaaagcctctgtcaccacaccaaaatacaaatggggatctgtgactcatcagagtgtgggggttgtgaaaggtgtgatggatgtcagatgtttcctatcaatggatccagattcaaatgcagaaactgtgatgactttgatttttgtgaaacgtgtttcaagaccaaaaaacacaataccaggcatacatttggcagaataaatgaaccaggcttcagcagaagaaacacttcctataaatctcgcccaaacaggaaaggagaagcattagggtgtccgactacgtgggtttcatagctgtggaaaagccaaaggggagactcctgaagaaaggcggtgaagactgtgaagagcgggtcaggaagatgagcacagcactgctactcctgtgggcacagggacagcatgtctccagccagcgccaccttgtttaatacatgggaactcactgaaattcattctgtattttgcccgcaaagttttaaagctttcatccacagtcaggaattaaacttataccaatgagagcctcacacattcaaggatgtactaagcactacaggcctcacagaaacagagatcccatcttggagttttcagtaccacatgggagataaagggttttgaacatgaaatgacaaaaacaacagcaagaagaaaattcttgtcctttttcattactatcagactcaaataaatgtcttggctcttacattacattcattcttcaaccattgtggtctggcttccacttccttcacttcaccaacatggctctgccaaaggaagcccgtgatctctaggccatcactttaattgatctttctacaacatttatcctggttgttaagccctccttacaacattcttctctctttgtttttatagctccatctctcctgcttctttaacttgataatgcatacttgatttttctatttgttatttcataaaccaattaatacacagataaaatgactgtatatcaaaccatgtttgtatagaaaaaatggattttggatgcctctcatatgtaattagttctattaaacatattaattgtattgtttaatttgtcaggtttttgacagaattttgtttacaagtaataaaaattttatctccaattttcaaaaa

SEQ ID NO: 120 - DNA, 837 bp, Homo sapiens
  misc_feature: Incyte ID No: 729620CB1
  unsure 3-4, 16, 20, 25, 29, 43, 52, 70, 72, 81, 85, 98, 106, 120, 137, 144,155, 164, 171-172, 182, 782, 784-785, 792, 796, 804, 831, 833: a, t, c, g, or other
ggnngcccccaaattncggnaaaanccgncctttttccccccnggggggctntttggcccgaatttccantnaatggcaancttnggcccacggaacnaggttttncccccaaacttggnaaaaagccggggccaantttgaanccgcaaaaccnccaaatttnaaattgnngaagttttanccccgctgcctacggaggtggcagccatctccttctcgctggcgattggaagacactctgcgacagtgttcagtccctgggcaggaaagcctccttccaggattcttcctcacctggggccgcttcttccccaaaaggcatcatggccgccctcagaccccttgtgaagcccaagatcgtcaaaaagagaaccaagaagttcatccggcaccagtcagaccgatatgtcaaaattaagcgtaactggcggaaacccagaggcattgacaacagggttcgtagaagattcaagggccagatcttgatgcccaacattggttatggaagcaacaaaaaaacaaagcacatgctgcccagtggcttccggaagttcctggtccacaacgtcaaggagctggaagtgctgctgatgtgcaacaaatcttactgtgccgagatcgctcacaatgtttcctccaagaaccgcaaagccatcgtggaaagagctgcccaactggccatcagagtcaccaaccccaatgccaggctgcgcagtgaagaaaatgagtaggcagctcatgtgcacgttttctgtttaaataaatgtaaaaactgccaaanannaaattanaaanaactttgngggggccccattcccaattgccttttngnaggg

SEQ ID NO: 121 - DNA, 4870 bp, Homo sapiens
  misc_feature: Incyte ID No: 234630.53
ggcactacgagctctaccggcgctgcaagttggaggagatgggctttcaggacagcgatggtgacagcccggcggcggggctccggctgcgctcgtggccgggccgggcggggaggccggtcccgcgggcgggggcaggggcggctccgcgggcttctcccgccgccgccgccaaggggagtttccaggaagtggccatattggatccattcagccgcagccgcccgggcggagcgcgtcccgcagccggctggtccctgtcgctgcccctgcgctcgtcccagcccacccgcccggtgcggagctcgccatggcggccaccgacctggagcgcttctcgaatgcagagccagagccccggagcctctccctgggcggccatgtgggtttcgacagcctccccgaccagctggtcagcaagtcggtcactcagggcttcagcttcaacatcctctgtgtgggggagaccggcattggcaaatccacactgatgaacacactcttcaacacgaccttcgagactgaggaagccagtcaccatgaggcatgcgtgcgcctgcggccccagacctatgacctccaggagagcaacgtgcagctcaagctgaccattgtggatgccgtgggctttggggatcagatcaataaggatgagagttacaggcccatagttgactacatcgatgcgcagtttgaaaattatctgcaggaggagctgaagatccgccgctcgctcttcgactaccatgacacaaggatccacgtttgcctctacttcatcacgcccacagggcactccctgaagtctctagatctagtgaccatgaagaaactagacagcaaggtgaacattattcccatcatcgccaaggctgacaccatctccaagagcgagctccacaagttcaagatcaagatcatgggcgagttggtcagcaacggggtccagatctaccagttccccacggatgatgaggctgttgcagagattaacgcagtcatgaatgcacatctgccctttgccgtggtgggcagcaccgaggaggtgaaggtggggaacaagctggtccgagcacggcagtacccctggggagtggtgcaggtggagaatgagaatcactgcgacttcgtgaagctgcgggagatgttgatccgggtgaacatggaagacctccgcgagcagacccacagccggcactacgagctctaccggcgctgcaagttggaggagatgggctttcaggacagcgatggtgacagccagcccttcagcctacaagagacatacgaggccaagaggaaggagttcctaagtgagctgcagaggaaggaggaagagatgaggcagatgtttgtcaacaaagtgaaggagacagagctggagctgaaggagaaggaaagggagctccatgagaagtttgagcacctgaagcgggtccaccaggaggagaagcgcaaggtggaggaaaagcgccgggaactggaggaggagaccaacgccttcaatcgccggaaggctgcggtggaggccctgcagtcgcaggccttgcacgccacctcgcagcagcccctgaggaaggacaaggacaagaagaattaacgcacgcacagacttacatgtcaagagtggactttagactttcatgtgttaagttgcttgagttacaccttgtgacccttctcccataacatggtgtgaggacggactgggagccggtacagactccagtgtttacagccttgctttcctcccaccgaccctggccccaggctgccccgggcctggcgggccacccctctctatgcaaacacgtaaaagccatgaatgctggaatccaaaactgacgaggtttatttttttcagagccagtggctggtcttccatttacagtgtcactattccctgacggagctgttatgtgccgctctagcgaaggccccagccgggatgctaggcctaattgttcagcgtggagatggcaactcacgtggtgccctaggtgcagctgcgtggtctggtatacatgctgcaaaattcacccagttcccctcattttaatttttctaacctacagcttaattttaataactttaaaacacttctaaatatttattttggcaccagcgtcaagacaaataatatcctctcccattattttcataagtaacacagattccctgatttttaaaaactaaaaatacagctaaacctttcttatgtataaagtatgcctatcatatacagggagaggtgggtaataaacttcctgtaatgacagtgtttggcatttctttatggatggaattggaacatgaacaagaccatgtccagcgtttttactgtgaatgtaaatggaacagcagcccaaagctgttgtctgtgccccagaggtgctacctgtagacagggaccaactccatgtgtgtgtgttaagtgtttgactccaattaagactcccaagcaaatcctgcatattccaaatgtaaagagtactcagtgggaaaaaggttgttacctcaaagtcattgcttctttcctggctgggtcacagggtgaagagatgaaggtgtctgatgtatatagacaattagggaaaaatgagcggcaaaggagctttccccttcagctgcactctaaaggggaacattttaaggaagtactagcagctttgactcttctatgctcctgttggtttacaagccaccaagaatgtcagtgttgagaatacggcctggtaaaatgggagatgtaaaatgactaaatgaaaggaagggtagttttaatgttgaagcaccgtgctgggcactggagctacccagaggaatgcacaacgctcccctcaaggagctcacagtctagcctactccctggctggaagcctcaggaagacgtgctaatttattgtggaattggtagtttgcttttcatgcccctgtcttccttctcatgaccatttccccctttctgtctggcttgcattattgatttccaggaccaagtcctggcttcctcctgccttcctgagatgatgttctgctcagggagaagtggaggggtgagctgtgtgtgtccactgaggcacggccaggaagaggcagcctttacctgtgaggggctccatgctccagcagcagagcaggttctagtgacaattcaactttttatgctatgaccaggggtggatctaaattttatggggctgaaagcttgaattatttagaaagacttctttaagaaaaacaatgttaatataaaattaggtacagggtcttggaaggggccctgaagattaagcttccttagcgtcacaataagtccgtatctggttgcaattgaaaactgatgcttcagtgagggtatctaaaaaggtaaactggcatatccaggggcaaatgtgggctgccaatggctcatctctagggtaattttatgtctgaaagtgtatgcagttgggtcagagcatgacctttaagatagcctctctcagctaacatatttatgaagatgaggcctggtgacccagcaggttcattggatacataagaaatgagaattcctggttcatgggccaacctaggactctggagtatgcagacttggccattcgtccattgtggcctgcgggtcgcaccccaggcatactgaaaggccatactcgtggctggctgcctgcgggcctaagccttcccaggatcttcaggacacttgacagacttgtgttttctggtctgagctgcctccacaggtccctccagcaagcctcactgcacctctcccctgctgtttgtgtttggaattttgtcttctttagctgagaccaaattaaaccttggtgcataaagtgagcttaaaacttgccactgtttagtaagttagcccccatagaatgtgaccctgtctgcagagtctcatttacccctctttttctcattgtcatttgttggctttattagggctgtcttacaggatcatgttggcatttactatcatgtctttatcataaaccatgtttgtttgaggtagaagaatcaccatataattcgttgcccaaattgggactattgagagagaaaggggatgctattaattacaccagatcaaaaggcataaaccagacctgtcccaggccgatgtggaaatatgttctttctagttgtgggtaccctgatctaggtggtttgtaattgtgcattactgactgcatatgtttgtgtatgtgtaaatgtgggctccctgttaagtggggctcatggatacgaggcctgaggaagtgtggcttgctagtctgttacgttaacatgcttttctaaaattgcttcacgtgttaattcatttactcctgcattcattgactgtttttgttcttttccattcactttgtacttatttttttcattaaattttgcatttattttgagtttttgtggtgtctttctttgggcagtagcttttctgatttaacgtttcctgagcccattaatctgctacaactgtggtaaaatacagcttgtctgttctttgaattttgtggaggttgatctacttctgtaggaattgttttaataggaaaccctgctacagacatctgtgaaaggctcttgcataggtgggggatggagggaagagtcacaggaaagttacaggaaggtaaaggggcagcctgtggtccatgaatctttattggttaactgggtgcaggacatgagaaaaggggcacctgcccttgaggagtgttcctccttaacacaaaggcttgccatgggactactaatattcgagtgccaggactgctcggaaccatattacatgcattaactcctctaatcctcatcctaatcctatgattagggaccattcatccccatttta

SEQ ID NO: 122 - DNA, 2708 bp, Homo sapiens
  misc_feature: Incyte ID No: 2695226CB1
tccgccttccccagctgtgcactctccatccagctgtgcgctctcgtcgggagtcccagccatgtccgacgagagagaggtagccgaggcagcgaccggggaagacgcctcttcgccgcctccgaaaaccgaggcagcgagcgacccccagcatcccgcggcctccgaacgggccgccgccgccgccgcctcgccgccactgctgcgctgcctagtgctcaccggctttggaggctacgacaaggtgaagctgcagagccggccggcagcgcccccggcccctgggcccggccagctgacgctgcgtctgcgggcctgcgggctcaacttcgcagacctcatggctaggcaggggctgtacgaccgtctcccgcctctgcctgtcactccgggcatggagggcgcgggtgttgtgatcgcagtgggcgagggagtcagcgaccgcaaggcaggagaccgggtgatggtgttgaaccggtcagggatgtggcaggaagaggtgactgtgccctcggtccagaccttcctgattcctgaggccatgacctttgaggaagctgctgccttgctcgtcaattacattacagcctacatggtcctctttgacttcggcaacctacagcctggccacagcgtcttggtacacatggctgcagggggtgtgggtatggctgccgtgcagctgtgccgtacagtggagaatgtgacagtgttcggaacggcctcggccagcaagcacgaggcactgaaggagaatggggtcacacatcccatcgactatcacacgactgactacgtggatgagatcaagaagatttcccctaaaggagtggacattgtcatggaccctctgggtgggtcagatactgccaagggctacaacctcctgaaacccatgggcaaagtcgtcacctatggaatggccaacctgctgacgggccccaaacggaacctgatggccctggcccggacatggtggaatcagttcagcgtgacagctctgcagctgctgcaggccaaccgggctgtgtgtggcttccacctgggctacctggatggtgaggtggagctggtcagtggtgtggtggcccgcctcctggctctgtacaaccagggccacatcaagccccacattgactcagtctggcccttcgagaaggtggctgatgccatgaaacagatgcaggagaagaagaatgtgggcaaggtcctcctggttccagggccagagaaggagaactagggcaagtggctgtgagaccctagagaccagcgaagggagaagttgggaagctacgttctgttggccaccagacttgcatttcagcctctgtcataatgctctgccctccctcccccgaagttctctgtggtgatgaccgctctcccctgcccctccccgcttcctgacctctgaagaggttgggaagtgaccatttggatgtctgggccctgccaaggcgacagggagggtcagagggaggccggctgcttcctgcccccaccctttccccgggcctgctgtgctgcttttgtgccaaggttagccagtcccccctgttgtgttccatgtgctttcacctctgcctcatctttcctcccgtccctgccccgccacctccccaaagaattgaaacgtcagctcaggatatggggccaatctctgtgagtccagcatgtacctgtctctccctagtgtcccttcagcctgggctgaccagtgcccgcctctgggcttgaccagttcccaatctcgtcctctgtccccaacttcttaagcacaattgggcttcttccatctccaggttttctgccattcttaaccaaggctgcctcttccaacagggcgggaatcagacctactcccctaggtcacaactctgggaaggatacagagcccccacccttcactgagttctctggatttgttctcagtgccttagcaacgaaaacctgtgcttgtgtgtgtgtggcggcggggagggaggatcctgtttcccacctccttctcctcccctgtactccccagtgccttccttgttctggtggagctggggtttctctcctccccagtcccacaacactgccaaaaatctgtgtatgtgccattgggtggggcagccccaagcctcctggggaggcagggcaaaaacaggtgccctcatcgtggtctgtgccatgtcccgtctctatggtggttgaggagaaaggcggggaagcttcctcagccttgcagatatgtgtggcatttactagccagagctctgaaaggcagtgctgtctgtttcttgtactgggaccaaagtaaaaatccaagcacattccccttgcagttaggggaggccctactgccttctcaaagcagagaggcagcttatcaaactcagcccaaaactctgtttacatgggtggggagatggagcagggaagtacagagtgggatggtcaggacctgggccattgcaaccaaaatggggacttcctgggtagggaggtcactccctctactcactgagctaggattagggagggttattgccccaaccattgcaatgggaggtggagggacaggctcagcctcctcattgtctaaatgaggcctaaatgtgtgaagtgcgatttctgcttttgtgtaccccaccaccccattaccacagctgcctttgtgtgtttgtgtcaataaaaagccaaaccctgaaaaaaaaaaa

SEQ ID NO: 123 - DNA, 3633 bp, Homo sapiens
  misc_feature: Incyte ID No: 892168.1
ctcagtggacagctcaaccatggtggaagctgccccgccaatcccaaagagtcgagggaggaagaggccgctcaacaaacccctgacatgactggtccctcgagtaaacaagcaaaagttacctacagctgtatttactgcaacaaacaattattttcaagtcttgcagttctgcagattcacctgaaaactatgcacttagataagccagaacaggcccatatttgtcagtattgcttggaggtcctgccctcactctataacctaaatgaacatcttaagcaagtgcatgaagctcaggacccaggtctgattgtttctgccatgcctgccattgtctaccagtgtaacttctgttccgaagttgtcaacgacctcaacactcttcaggaacacatccgatgttctcatggatttgcaaaccctgcagctaaagatagtaatgcattcttttgtccccattgctatatggggtttctcactgactcttccctggaagagcatattagacaggttcattgtgacctcagtggctcccgatttgggtctccagtgcttgggactccccaaagaaccagtagtagaagtctattcttgttcctattgtacaaattcgccaatattcaacagcgttcttaaactgaacaagcatatcaaagagaatcataaaaacattcccttggccctgaattatatccacaatgggaagaaatccagggccttaagccccctatctcctgtggccatagagcagacatctcttaagatgatgcaggcagtaggaggtgcacctgcacgtcccactggagaatatatctgtaatcaatgtggtgctaagtacacatccctagacagctttcagactcacctaaaaactcatctcgacactgtgcttccaaaattgacctgtcctcagtgcaacaaggaattccccaaccaagaatccttgctgaagcatgttaccattcactttatgatcacttcaacgtattacatctgtgagagttgtgacaagcaattcacatcagtggatgaccttcagaaacacctgctggacatgcacacctttgtcttctttcgctgcaccctctgccaggaagtttttgactcaaaagtctccattcagctccacttggctgtgaagcacagtaacgaaaagaaagtctataggtgcacatcttgcaactgggacttccgcaacgaaactgacttgcagctccatgtgaaacacaaccacctggaaaaccaagggaaagtgcataagtgcattttctgcggtgagtcctttggcaccgaggtggagctgcaatgccacatcaccactcacagtaagaagtacaactgcaagttctgtagcaaagccttccatgcgatcattttgttagaaaaacacttgcgagaaaaacactgtgtattcgaaaccaagacacccaactgtggaacaaatggagcttccgagcaagtgcagaaagaggaagtggagctgcagactttgctgaccaacagccaggagtcccacaacagtcacgatgggagcgaagaagacgttgacacctctgagcctatgtacggctgcgacatttgtggggcagcctacactatggaaactttgctgcagaatcaccagctccgagaccacaacatcagacctggagaaagtgccatcgtgaaaaagaaagctgagctcattaaagggaattacaagtgcaacgtgtgctctcgaaccttcttctccgaaaatggcctccgggaacatatgcagacccacctaggccctgtcaaacactacatgtgccctatttgcggagagcggtttccctcccttttaactcttactgaacacaaagtcacgcatagtaagagtcttgatactggaaactgccggatttgcaagatgcctctccagagtgaagaggagtttttagagcattgccaaatgcaccctgacttgaggaattccctgacaggctttcgctgcgtggtgtgcatgcagacagtgacctccaccttggaactcaaaatccatgggacgttccacatgcaaaagacagggaatgggtctgcagttcagaccacagggcggggccagcacgtccaaaaactgtataagtgcgcatcttgcctcaaagaattccgttccaagcaagatctggtgaaacttgatatcaatggcctgccatatggtctgtgtgccggctgcgtgaatctcagtaagagcgccagcccaggcattaacgtccctcccggcacgaatagaccaggcttgggccagaatgagaatctgagtgccattgaggggaaaggcaaggtggggggactgaagacacgctgctctagctgcaacgttaagtttgagtctgaaagtgaactccagaaccacatccaaaccatccaccgagagctcgtgccagacagcaacagcacacagttgaaaacgccccaagtatcaccaatgcccagaatcagtccctcccagtcggatgagaagaagacctatcaatgcatcaaatgtcagatggttttctacaatgaatgggatattcaggttcatgttgcaaatcacatgattgatgaaggactgaaccatgaatgcaaactctgcagccagacctttgactctcctgccaaactccagtgccacctgatagagcacagcttcgaagggatgggaggcaccttcaagtgtccagtctgctttacagtatttgttcaagcaaacaagttgcagcagcatattttctctgcccatggacaagaagacaagatctatgactgtacacaatgtccacagaagtttttcttccaaacagagctgcagaatcatacaatgacccaacacagcagttagtgcaagtacagtctctcaaggagaattgattttgtggcacaaaaagggaacatgttttactctttgcacgaaactttcattgttaatgtatattattcagaaacattgtattgtaccataaaacttgtattatcaaactgttggatgttcatgtgtttgaacttttgcgcaccggatagaccccttgtatataaagtgttgcacatgtattatgtcgtctgatactaaaatggtcttataaagacaagtggacttgggccctattcaggcaagattaaaaaaaaaaaaagactatgaccaaaatggcttaagataaagtatttttaaggaagaaagattaaaaacaactgttatacatgagactatggttggacttccttttctttacacttaagcctagaatttctctttaggtatatcagcgcttaaatccaagactattttttattgctgaagattcttgcaaaccatgaagagatgttctcacagaacagaaccccacagctggataaggcccgtatatatatatttgtaagccttgcaatgtgacaggtagcatcactatatatgcaatagttgttatgtagactgtcaaagaatttttttttccctggatacatttgaagctttgagtgttcaaggttttccttaatgatttcacgcagccaaattcttgaatcagttgaactaacctgtatgttactgttattaatgtttactctgcagtctgaacctggagattactggaattgttttccaagaggaaataaattcagtttaccatt

SEQ ID NO: 124 - DNA, 3340 bp, Homo sapiens
  misc_feature: Incyte ID No: 1348684CB1
  unsure 3182, 3190: a, t, c, g, or other
tgccccttcctctatccctagggctcagtttcccacatccgtcctcccccttcccaggcccggagttccagaccttttggtctcctttcgtggtcgttcctgggtccttgccccctttccccactttggagttccagattgcaaacccagcctccctccacccccagaaaattgcttccatggaaatgcctctctaaaacatgaacttttcctagagactacgccagtctctcttcccacttgctgaccctttgctacctatgtgcccggttttactctcatttgggtaaggtcgaggctggctctggaagcagcaccatggttctgcggtctggcatctgtggcctctctccacatcggatcttcccttccttactcgtggtggtcgctttggtggggctgctgcctgttctcaggagccatggcctccagctcagcccaactgccagcaccattcgaagctcagagccaccacgagaacgctcgattggggatgtcaccaccgctccaccggaggtcaccccagagagccgccctgttaatcattccgtcactgatcatggcatgaagccgcgcaaggcctttccagtcctgggcatcgactacacacacgtgcgcacccccttcgagatctccctctggatccttctggcctgcctcatgaagataggtttccatgtgatccccactatctcaagcatcgtcccggagagctgcctgctgatcgtggtggggctgctggtggggggcctgatcaagggtgtaggcgagacaccccccttcctgcagtccgacgtcttcttcctcttcctgctgccgcccatcatcctggatgcgggctacttcctgccactgcggcagttcacagaaaacctgggcaccatcctgatctttgccgtggtgggcacgctgtggaacgccttcttcctgggcggcctcatgtacgccgtgtgcctggtgggcggtgagcagatcaacaacatcggcctcctggacaacctgctcttcggcagcatcatctcggccgtggaccccgtggcggttctggctgtctttgaggaaattcacatcaatgagctgctgcacatccttgtttttggggagtccttgctcaatgacgccgtcactgtggtcctgtatcacctctttgaggagtttgccaactacgaacactgtggcatcgtggacatcttcctcggcttcctgagcttcttcgtggtggccctgggcggggtgcttgtgggcgtggtctacggggtcatcgcagccttcacctcccgatttacctcccacatccgggtcatcgagccgctcttcgtcttcctctacagctacatggcctacttgtcagccgagctcttccacctgtcaggcatcatggcgctcatagcctcaggagtggtgatgcgcccctatgtggaggccaacatctcccacaagtcccacaccaccatcaaatacttcctgaagatgtggagcagcgtcagcgagaccctcatcttcatcttcctcggcgtctccacggtggccggctcccaccactggaactggaccttcgtcatcagcaccctgctcttctgcctcatcgcccgcgtgctgggggtgctgggcctgacctggttcatcaacaagttccgtatcgtgaagctgacccccaaggaccagttcatcatcgcctatgggggcctgcgaggggccatcgccttctctctgggctacctcctggacaagaagcacttccccatgtgtgacctgttcctcactgccatcatcactgtcatcttcttcaccgtctttgtgcagggcatgaccattcggcccctggtagacctgttggctgtgaagaaaaagcaagagacgaagcgctccatcaacgaagagatccacacacagttcctggaccaccttctgacaggcatcgaagacatctgtggccactacggtcaccaccactggaaggacaagctcaaccggtttaataagaaatatgtgaagaagtgtctgatagctggcgagcgctccaaggagccccagctcattgccttctaccacaagatggagatgaagcaggccatcgagctggtggagagcgggggcatgggcaagatcccctctgccgtctccaccgtctccatgcagaacatccaccccaagtccctgccttccgagcgcatcctgccagcactgtccaaggacaaggaggaggagatccgcaaaatcctgaggaacaacttgcagaagaccaggcagcggctgcggtcctacaacagacacacgctggtggcagacccctacgaggaagcctggaaccagatgctgctccggaggcagaaggcccggcagctggagcagaagatcaacaactacctgacggtgccagcccacaagctggactcacccaccatgtctcgggcccgcatcggctcagacccactggcctatgagccgaaggaggacctgcctgtcatcaccatcgacccggcttccccgcagtcacccgagtctgtggacctggtgaatgaggagctgaagggcaaagtcttagggttgagccgggatcctgcaaaggtggctgaggaggacgaggacgacgatgggggcatcatgatgcggagcaaggagacttcgtccccaggaaccgacgatgtcttcacccccgcgcccagtgacagccccagctcccagaggatacagcgctgcctcagtgacccaggcccacaccctgagcctggggagggagaaccgttcttccccaaggggcagtaacgccagggccagcaggcagcgcctgtcccctcacagactcttccaccagagcaggggctgctgggggctccccttgcccttcctgacccggattggccctgcccctccccctaccgcatggcagctgggcccacagcccccaccccagcacagctcctcccctgcttcgctccggggagcatcgtcgccacagagatgctccccaatccatttggcagaaactcctggggtggttaaggcggtcatacgccttcctaagtccaaggttcctccgggacttggactaggggctccggaggctgcttccctcttggctgaatcctgctgcgtcatttcaaggacaaatcctgaagttttcttgacccaaaggggttctcactgggcgtcagacttgtggggggcctcatcctgggggnggagcganggggggatctgaagggccttcccccttgagagtgtaaggcgctctggctttttaatgcaaagggggggatcacaaaccaaagggggggtacccaaaggggacacattagggctctggggggggaaagaggggacttggctctagatcacc

SEQ ID NO: 125 - DNA, 1235 bp, Homo sapiens
  misc_feature: Incyte ID No: 998034.19
gcccgatgtggctgaggggccgccaccgccagcagggaggcggagggctagcgagccaagcggtggggacgccgctgccttcctctttgcctgtctcgccgccctcctagacacgctcctcatctacggatcctaccctccccgctcttgcaagcattcactcggccggtcgcctgctgaccctccttcgccacaggctcgtagcggaggcagcagcgaggtgtccgatttgggcacgtgaggcccgcgatccccggcggtggacgccaggcagggcatgaagacccccaacgcacaggaagccgaagggcaacaaaccagggcagctgcaggacgggccactgggtctgcaaacatgacaaagaaaaaagtctcccaaaagaagcagagaggccgaccttcatcccagccccgcaggaacatcgtgggctgcagaatttctcatggatggaaggaaggagatgagcccatcacgcagtggaaaggaaccgttctggatcaggtgcctataaatccctctctttatctggtgaaatatgatggaattgactgtgtctatggactggaacttcacagagatgaaagggttttgtctcttaaaattctttctgacagggtggcatcatctcacattagtgatgccaaccttgcaaataccataattggcaaagcagtggaacatatgtttgagggagagcatggttctaaggatgaatggagggggatggtcttagctcaagcacctatcatgaaagcctggttttatattacctatgagaaagatcctgtcttgtacatgtaccagcttctagatgattataaggaaggtgacctccgcatcatgccagaatccagtgagtctcctccaacagagagggagccaggaggagttgtagatggcctaataggtaagcatgtggaatataccaaagaagatggctccaaaaggatcggcatggtcattcaccaagtggaagccaaaccctctgtgtatttcatcaagtttgatgatgatttccatatctatgtctacgatttggtgaaaaagtcctaactgttagggtaaaatttggcacatgtgtggaaacaaatgtataatttgtagacatgcaaaaaatgttgcctttcagtgtattgaaagcttatggaatccctgataactaaacatctttgccagcattaactgttgttttgctctaaaaaatacaaacttgtgtgtacatgaaaaaaaaaaa

SEQ ID NO: 126 - DNA, 4826 bp, Homo sapiens
  misc_feature: Incyte ID No: 238854.23
cgcctttctcctttctaagcggctcgcgcccaggccgccgcccggggtggcgcactcgcagccctcccgctccgggcgccctccgccgctccgagaccccctgggggcgcgtcctctcccgctcccctgtttccctcccccggctcagggcgggcgcgtggtcccaggggaggctcccgcccagccccgctactcctttgtgcggccgggcgggcgctgcgtcaaggtggaggcgcggccacacgcgcgcacccacccgcgcgcacccagcccccgggagaggcaggaagggaggcggcggcgcgaggaggagggagcggccgtggagcccaatcgttcgctccccttcccgggtccgcgcgcggcgccgcctccgccattgctgcgagcaggagcaggagacgcggagctcggagcgctgagctgacctgccggagccgggcgtgggctgcagcctcggagctcccggaacgatggtgaagttggggaacaatttcgcagagaagggcaccaagcagccgctgctggaggatggcttcgacaccattcccctgatgacgcccctcgatgtcaatcagctgcagttcccgcccccggataaggtggtcgtgaaaactaagaccgagtatgaacctgaccgcaagaaagggaaagcacgtcctccccaaattgctgagttcaccgtcagcatcacggagggtgtcaccgagaggtttaaggtctccgtgttggtcctcttcgccctggccttcctcacctgcgtcgtcttcctggttgtctacaaggtgtacaagtatgaccgcgcctgccccgatgggttcgtcctcaagaacacccagtgcatcccagaaggcttggagagctactacgcggagcaagactccagtgcccgggagaaattttacacagtcataaaccactacaacctggccaagcagagcatcacgcgctccgtatcgccctggatgtcagttctgtcagaagagaagctgtccgagcaggagactgaagcggctgagaagtcagcttagcgggatgggcaagttccttacaatgtgtcacttgcaaataacaaagggactttgagggacatttcattaaatataattactgatactttagaggttactcatttacggtgcaattgcttctgtttgctaatgctgctttgcaaataaaacttgctgccgaccacccacgggcataaaatcaagtgcatttcagcattgcctaaagagctctgacaccacttttcatgttaagatcttcatttagctcctttactgggatttattggatgctgtaaaaaaataaatttacactggatatgcgaagggtttggatctcagataaatgcattttgtggaattgattttctgaaccgaccctgctgtctgcaaaccttcctccatagccatatctagagtgatctctcgctgtgctaagagcaagcctacttcgcatttcttcctcggccatcagcgggtaacagtgctgactgctgccaaggtgcactgtagtaagtaagtggcatagagaacgaggaaaaagacccccccacccctccctgtgctgactcctgagtcggggtgggacggccctgcaatgtggcaggctcggtgtggattgactactccctcccctctgactctggcatcttggtaaggagggaggggcaccacccatctgggtggagacagctggggtttgctccagtgtgtgtagactggcagagcatgtgagggagagggctgggaagagacggccctgggcccgtgaggtgcagaactctccctgcaggtagtctgtctgctctgtgatgtgctgataggaaagagcccccactggccctctggttcacttctattatgaataaatttgcaccaatagccccattagtttttaaagaaatgagctgggtgggaaaagtggaaatgtaatttctggtaagcttgagctactttaatttttattctatgaaactgatatcccttgatgtgggaaacaggcaggaaaggctgtggggtgggggtgggggactggtgtggcaccgtgcaaacaaaatgacaaatttcaactcacaatctttgtaagaaaattgttccagtttgaatcttgatattaaagtttatgtttacaaaactgccagttagatgaactaagtgtgtaaaacaaatagaaaagacattcgcagacatttcttctatgttattgaatgtgttgtttctggtgtacgtgtcaaaagtttcagttttttagatcagaaataaacgacaaatagtgtgagatgtgttgtgaacaggcatggtgaccgtggtcagcgccactcttgtttcctgaaatgtgcttctaagacagaaaatgtattttctcatcaagggtgtctggagacacagaccgtgaccttggcgcagcggtgtgcatcagaggcgtgtgctgagaagggtggtgttaagctgtggaaaatgactcaagagcaataaatcagtgccaaagcttccctgcgcatctgaatagacacaagtgaagcccgtgtgcgcacagtgcagaggccgagcctgtatttccaggtagacgtggactttattgactgtgaattcatttacatgtaacttctgacatttcactctgtgcaaataaagaacatgaggatacctgtgctgcccagtggactgtctgtacacacacgcatttcaccaggcgcagtgcagactgtctcatgcccatgtgggcgctgggatgcttcctgtacagatgtctcatgccttcagttacacataggtgttcctgtttacagttcctggaggtcagaagcacaggcacgagagaagcaggcccgttcttccgtggcccacttcttcctttgaacaaaggctccttggacccagtggcgggaaactggccctcccacaccccctgcctgttctgggggcagcagtctttggaggagtaatgccaggcagcccctcactgagggccccagtctcccctgcatttcttccctgattgattgataggaggtggctgggctgccactgaatttgtcaacttagactcattgacaacacattaaggggctgtaattatatttattagattaacaaggcagatgtgaattttctcttctataatccagtaagtctgtgtattcgttgactcagacagacaagaagccacaaggaaacaaagaagtaatcatttgttgagagacgttattaactatgatcttccctgaagctaccgggatgggaaaggtcagtgtcttcctttgaaccctgagacaattaggggctcttgaggcctgctgtgcccctgctgccaaggcagcctcaagttcaaggagcagctaatcacccactcctgcattcagtctgtcttgcctgatgagggctacgcaggctgcctcccattggtgtgcactgtttcctttttcagctgctaaatgggctgaacaccatcggcctggggtatccctttttggggaatacgtctgtctgtctgaactcctttcccttcaaatggcactgtgataaaatctggtcataccatgctccagcactggaagtacatgaaagcacgcagtctgtgagtgcccatgaggactctcgtgctggggcccccgtggccctggctagctgtcgtaccagtcgaggaagagcaaggagaaggagcacatcacgaggaagaagaggatccacacgcggaagccagcgttgtttttaatggcctctcttatgtcttcgttgccttccttgatattttcagttgcccccacaactaactggtgaatgctgtcaatctcagcttcctgttgcaaaaccttttccgtgaatatctcttggagtctggaaatctcaaccactctcccttcgatttgcctcacttcatcaaacaagctgttcatttcaccaattagtcgctgattttcctgttcaaacatttgtatttcttctggggataactcatcttcgcctttgccatctccccacgttcccaattcaggttgtgtttcagccaaaatttttttctggacgttcttcagtggcagggttttcttcagagtcttttgaaggactctgtgaaactttcgcagaagatgtggattctcttgtctttgtatttggttctggttccagcttagataatcttttcttatccaccactcttttaactcggatggctctctgttctgagtaaagtttacatactcctgttgcagaagaaaataccagaagagagactgcttaaaacagcttctcaggcaaagccatcattaaatataatgagatactacagtcttcagctagcaaagctaaattctgcatcacatctattgtgaaatgttacatttgacctttaaaagaaaatgaaatacttttcaagtaatcttcaatgaaatccaaaacagcggtcctgtgctccttcacttgctgggaatgtatctccttgtgagcttctgttcgtagttgctgaattgcttctgaacaggtcctcatgaatatctgggcatcctggtctatctggtctcgttctgtgtctgtcatcctcccatattcagacatggtatggctaaaaaaagacagcaaaggaaagggcagcagcaaatgagaacataatatagtctgagtgggatgggaagagaagaaaaggcctccctgatcaggtgacatttaagctgagacttgaagggtgaggaggaacaggccaggtgaaaaggtgagagaaccatctagatagatagtagaacacatatgaagggtgtgtggtagaaaatcctccggaatagacccaactgacgtaagccagatggggagagggagagggac

SEQ ID NO: 127 - DNA, 559 bp, Homo sapiens
  misc_feature: Incyte ID No: 1102141.1
attcacccaccagctcagctccacgtggtcggggtagaagctgtggccaggcacaccagtgtggcccttttgggtgtgggagatctctgcttctgatggctcaaacacagcgacctcgggtgggaacacgtttttcaggtcctcgagcactgtcagccgggtgcctgggccaaaatactgcgtatctgtgcccccgctatttcactgctggcacagaagtacacagatgtctgagagggtacagcagacgccaacgtgagggggaaatcatctgtgtttgctctggagacactataaccatcagggacttctcctttgccagtggtacctgcagtatttgaataatggatgagccttagccccagtcctagatcttgtctataccagtacatggcattatgtctcatatcctgggtacatctcagtgtcatgcgccgtcctgctgccaggatctgagatgttggtgcctgggtgatcccagcaatcactggacctgcccacaggagagaaaaggccacacagcacaggagcctgattctcatggcagatgctacaagca

SEQ ID NO: 128 - DNA, 1249 bp, Homo sapiens
  misc_feature: Incyte ID No: 480187.111
gactgttctgtgtcaggacaaggacgtccgtcctcctctcgctcacagtgaccctgatctggtaaagctccctgactctgtcatgggcaccaggctcctctgctgggcagccctgtgcctcctgggggcagatcacacaggtgctggagtctcccagacccccagtaacaaggtcacagagaagggaaaatatgtagagctcaggtgtgatccaatttcaggtcatactgccctttactggtaccgacaaagcctggggcagggcccagagtttctaatttacttccaaggcacgggtgcggcagatgactcagggctgcccaacgatcggttctttgcagtcaggcctgagggatccgtctctactctgaagatccagcgcacagagcagggggactcagccgcgtatctccgtgccggcgttgcggcgggatggagctcctacaatgagcagtattttggcccaggcacccggctgacagtgctagaggacctgaaaaacgtgttcccacccgaggtcgctgtgtttgagccatcagaagcagagatctcccacacccaaaaggccacactggtgtgcctggccacaggcttctaccccgaccacgtggagctgagctggtgggtgaatgggaaggaggtgcacagtggggtcagcacagacccgcagcccctcaaggagcagcccgccctcaatgactccagatactgcctgagcagccgcctgagggtctcggccaccttctggcagaacccccgcaaccacttccgctgtcaagtccagttctacgggctctcggagaatgacgagtggacccaggatagggccaaacctgtcacccagatcgtcagcgccgaggcctggggtagagcagactgtggcttcacctccgagtcttaccagcaaggggtcctgtctgccaccatcctctatgagatcttgctagggaaggccaccttgtatgccgtgctggtcagtgccctcgtgctgatggccatggtcaagagaaaggattccagaggctagctccaaaaccatcccaggtcattcttcatcctcacccaggattctcctgtacctgctcccaatctgtgttcctaaaagtgattctcactctgcttctcatctcctacttacatgaatacttctctcttttttctgtttccctgaagattgagctcccaacccccaagtacgaaataggctaaaccaataaaaaattgtgtgttgggcctggttgcaaaaaaa

SEQ ID NO: 129 - DNA, 1237 bp, Homo sapiens
  misc_feature: Incyte ID No: 480187.113
cacaagtccactctctcaactattcccagaaattccaaaaactcctttaaagaagccagtgcagggcatgaaagggaggagccatgctagaggagatcctgggaatgggggaatgattacaggctgtgacctcaatggcacagcacctctcagaggcagtggaaaccacagcctagtcttctcaccactgcagaccagaatcctgccctgggccttgcctggtctgcctgactcggccatgggctgcaggctcctctgctatgtggccctctgcctcctgcaagcagatccactggacacagccgtttcccagactccaaaatacctggtcacacagatgggaaaaaaggagtctcttaaatgagaacaaaatctgggccataatgctatgtattggtataaacaggactctaagaaatttctgaagacaatgtttatctacagtaacaaggagccaattttaaatgaaacagttccaaatcgcttctcacctgactctccagacaaagttcatttaaatcttcacatcaattccctggagcttggtgactctgctgtgtatttctgtgccagcagccaactacgactagcgggacctacgagcagtacttcgggccgggcaccaggctcacggtcacagaggacctgaaaaacgtgttcccacccgaggtcgctgtgtttgagccatcagaagcagagatctcccacacccaaaaggccacactggtatgcctggccacaggcttctaccccgaccacgtggagctgagctggtgggtgaatgggaaggaggtgcacagtggggtcagcacagacccgcagcccctcaaggagcagcccgccctcaatgactccagatactgcctgagcagccgcctgagggtctcggccaccttctggcagaacccccgcaaccacttccgctgtcaagtccagttctacgggctctcggagaatgacgagtggacccaggatagggccaaacctgtcacccagatcgtcagcgccgaggcctggggtagagcagactgtggcttcacctccggtacaagagaaaggattccagaggctagactccaaaaccatcccaggtcattcttcatcctcacccaggattctcctgtacctgctcccaatctgtgttcctaaaagtgattctcactctgcttctcatctcctacttacatgaatattctctcttttttctgtttccctgaagatgagctcccaaccccca

SEQ ID NO: 130 - DNA, 1186 bp, Homo sapiens
  misc_feature: Incyte ID No: 480187.136
  unsure 32: a, t, c, g, or other
cggaggactcctggttctgggtgctgggagancgatggggctctcagcggtgggaaggacccgagctgagtctgggacagcagagcgggcagcaccggtttttgtcctgggcctccaggctgtgagcacagatacgcagtattttggcccaggcacccggctgacagtgctcggtaagcgggggctcccgctgaagcccgggaactggggagggggcgccccgggacgccgggggcgtcgcagggccagtttctgtgccgcgtctcggggctgtgagccaaaaacattcagtacttcggcgccgggacccggctctcagtgctggaggacctgaaaaacgtgttcccacccgaggtcgctgtgtttgagccatcagaagcagagatctcccacacccaaaaggccacactggtgtgcctggccacaggcttctaccccgaccacgtggagctgagctggtgggtgaatgggaaggaggtgcacagtggggtcagcacagacccgcagcccctcaaggagcagcccgccctcaatgactccagatactgcctgagcagccgcctgagggtctcggccaccttctggcagaacccccgcaaccacttccgctgtcaagtccagttctacgggctctcggagaatgacgagtggacccaggatagggccaaacctgtcacccagatcgtcagcgccgaggcctggggtagagcagactgtggcttcacctccggtaagtgagtctctcctttttctctctatctttcgccgtctctgctctcgaaccagggcatggagaatccacggacacaggggcgtgagggaggccagagccacctgtgcacaggtacctacatgctctgttcttgtcaacagagtcttaccagcaaggggtcctgtctgccaccatcctctatgagatcttgctagggaaggccaccttgtatgccgtgctggtcagtgccctcgtgctgatggccatggtcaagagaaaggattccagaggctagctccaaaaccatcccaggtcattcttcatcctcacccaggattctcctgtacctgctcccaatctgtgttcctaaaagtgattctcactctgcttctcatctcctacttacatgaatacttctctcttttttctgtttccctgaagattgagctcccaacccccaagtacgaaataggc

SEQ ID NO: 131 - DNA, 1690 bp, Homo sapiens
  misc_feature: Incyte ID No: 480187.59
aggaggaccaagccctgagcacagacacagtgctgcctgcccctttgtgccatgggctccaggctgctctgttgggtgctgctttgtctcctgggagcaggcccagtaaaggctggagtcactcaaactccaagatatctgatcaaaacgagaggacagcaagtgacactgagctgctcccctatctctgggcataggagtgtatcctggtaccaacagaccccaggacagggccttcagttcctctttgaatacttcagtgagacacagagaaacaaaggaaacttccctggtcgattctcagggcgccagttctctaactctcgctctgagatgaatgtgagcaccttggagctgggggactcggccctttatctttgcgccagcagcttgaggcctagcgggtcctcctacaatgagcagttcttcgggccgggcaccaggctcaccgtgctagaggacctgaaaaacgtgttcccacccgaggtcgctgtgtttgagccatcagaagcagagatctcccacacccaaaaggccacactggtgtgcctggccacaggcttcttccccgaccacgtggagctgagctggtgggtgaatgggaaggaggtgcacagtggggtcagcacagacccgcagcccctcaaggagcagcccgccctcaatgactccagatactgcctgagcagccgcctgagggtctcggccaccttctggcagaacccccgcaaccacttccgctgtcaagtccagttctacgggctctcggagaatgacgagtggacccaggatagggccaaacccgtcacccagatcgtcagcgccgaggcctggggtagagcaggtgagtggggcctggggagatgcctggaggagattaggtgagaccagctaccagggaaaatggaaagatccaggtagcggacaagactagatccagaagaaagccagagtggacaaggtgggatgatcaaggttcacagggtcagcaaagcacggtgtgcacttcccccaccaagaagcatagaggctgaatggagcacctcaagctcattcttccttcagatcctgacaccttagagctaagctttcaagtctccctgaggaccagccatacagctcagcatctgagtggtgtgcatcccattctcttctggggtcctggtttcctaagatcatagtgaccacttcgctggcactggagcagcatgagggagacagaaccagggctatcaaaggaggctgactttgtactatctgatatgcatgtgtttgtggcctgtgagtctgtgatgtaaggctcaatgtccttacaaagcagcattctctcatccatttttcttcccctgttttctttcagactgtggcttcacctccgagtcttaccagcaaggggtcctgtctgccaccatcctctatgagatcttgctagggaaggccaccttgtatgccgtgctggtcagtgccctcgtgctgatggccatggtcaagagaaaggattccagaggctagctccaaaaccatcccaggtcattcttcatcctcacccaggattctcctgtacctgctcccaatctgtgttcctaaaagtgattctcactctgcttctcatctcctacttacatgaatacttctctcttttttctgtttccctgaagattgagctcccaacccccaagtacgaaatagg

SEQ ID NO: 132 - DNA, 567 bp, Homo sapiens
  misc_feature: Incyte ID No: 480187.85
taccaccaatgccccttcagatttcaaatccactgtgttgtcccccagccaagtggattctcctctgcaaattggtggtggcctcatgcaagatccaggttaccgtgtccagctaactcgagacaggaaaagataggctcaggaaagagaggaagggtgtgccctctgtctgtgctaagggaggtggggaaggagaaggaattctgggcagccccttcccactgtgctcctacaatgagcagttcttcgggccagggacacggctcaccgtgctagaggacctgaaaaacgtgttcccacccgaggtcgctgtgtttgagccatcagaagcagagatctcccacacccaaaaggccacactggtgtgcctggccacaggcttctaccccgaccacgtggagctgagctggtgggtgaatgggaaggaggtgcacagtggggtcagcacagacccgcagcccctcaaggagcagcccgccctcaatgactccagatactgcctgagcagccgcctgagggtctcggccaccttctggcagaacccccgcaaccacttccgctgtcaag

SEQ ID NO: 133 - DNA, 499 bp, Homo sapiens
  misc_feature: Incyte ID No: 994483.1
atgacactgtgtcctggtaccaacaggccctgggtcaggggccccagtttatctttcagtattatgaggaggaagagagacagagaggcaacttccctgatcgattctcaggtcaccagttccctaactatagctctgagctgaatgtgaacgccttgttgctgggggactcggccctctatctctgtgccagcagcttgtactacggatacgagcagtacttcgggccgggcaccaggctcacggtcacagaggacctgaaaaacgtgttcccacccgaggtcgctgtgtttgagccatcagaagcagagatctcccacacccaaaaggccacactggtgtgcctggccacaggctttctaccccgaccacgtggagctgagctggtgggtgaatgggaaggaggtgcacagtggggtcagcacggacccgcagcccctcaaggagcagcccgccctcaatgactccagatactgcctgagcagccgcctgagggtct

SEQ ID NO: 134 - DNA, 474 bp, Homo sapiens
  misc_feature: Incyte ID No: 1326443.1
  unsure 292, 313, 324, 356, 379, 423, 430, 441: a, t, c, g, or other
cacacagatgggaaacgacaagtccattaaatgtgaacaaaatctgggccatgatactatgtattggtataaacaggactctaagaaatttctgaagataatgtttagctacaataataaggagctcattataaatgaaacagttccaaatcgcttctcacctaaatctccagacaaagctcacttaaatcttcacatcaattccctggagcttggtgactctgctgtgtatttctgtgccagcagaccgtccgggacaggcaaccaagagacccagtacttcgggccaggnacgcggctcctggtgctcgangacctgaaaancgtgttcccacccgaggtcgctgtgtttgagncatcagaagcagagatctcccanacccaaaaggccacactggtatgcctggccacaggctttctacnccgaccnacgtggaagcngagctggtgggtgaatgggaaggaggtgcacag

SEQ ID NO: 135 - DNA, 447 bp, Homo sapiens
  misc_feature: Incyte ID No: 1102234.5
gatggctcaaacacagcgacctcgggtgggaacaccttgttcaggtcctctacaacggttaacctggtccccgaaccgaaggtgtagccataggtcctgtccgagacgctgcagagatatatgctgctgtcttcagggctcatgttgctcacagtcagagttgagaatgttaggtttgggcggctgatgggaaacttgtcaatgacaaatccactctcatatgtggccagagagccctgatttgcagttgcgatcagtgtcaggctctgtccaggttgctgacggtaccagaacatcatggtgaacttggctatcgacttgacactggatcgtcagggaggttccacgttgacagatatccctgcttggcttttgagagatgacagcactgaacacagagcctagtcccaggagaaggagcagaagactcagcatcttcaagtgatg

SEQ ID NO: 136 - DNA, 806 bp, Homo sapiens
  misc_feature: Incyte ID No: 1384259.1
acgggacagagacagggacagggcaaatatggggacacctgtctcaaggaagcagcaaatgatatagaaaataaatatctgttccatccctgttccagacaagcccatgtacctgccaaggtaggaagctgtgtatcacattgcaacaaggaatgaccccggccctggtaaagtcaacagcaacagtctgcacctttcattcacagcagtaacactgttctccttaactctgactccaaatttgtcttctttctctacaggtcatggggatgccatggtcatccagaacccaagataccaggttacccagtttggaaagccagtgaccctgagttgttctcagactttgaaccataacgtcatgtactggtaccagcagaagtcaagtcaggccccaaagctgctgttccactactatgacaaagattttaacaatgaagcagacacccctgataacttccaatccaggaggccgaacacttctttctgctttcttgacatccgctcaccaggcctgggggacgcagccatgtacctgtgtgccaccagccttctaccggtcggggagcagttcttcgggccaggacacggctcaccgtgctagaggacctgaaaaacgtgttcccacccgaggtcgctgtgtttgagccatcagaagcagagatctcccacacccaaaaggccacactggtatgcctggccacaggcttctaccaccgaccacgtggagctgagctggtgggtgaatgggaaggaggtgcacagtggagtcagcacaagacccgcagccctcaagagcagaccgc

SEQ ID NO: 137 - DNA, 1426 bp, Homo sapiens
  misc_feature: Incyte ID No: 2678968CB1
caactctccccagagaaggtggtgtgaggccatcacggaagatgctgctgcttctgctgcttctggggccaggctccgggcttggtgctgtcgtctctcaacatccgagcagggttatctgtaagagtggaacctctgtgaagatcgagtgccgttccctggactttcaggccacaactatgttttggtatcgtcagttcccgaaacagagtctcatgctgatggcaacttccaatgagggctccaaggccacatacgagcaaggcgtcgagaaggacaagtttctcatcaaccatgcaagcctgaccttgtccactctgacagtgaccagtgcccatcctgaagacagcagcttctacatctgcagtgctggtcaggtgacaccggagacccagtacttcgggccaggcacgcggctcctggtgctcgaggacctgaaaaacgtgttcccacccgaggtcgctgtgtttgagccatcagaagcagagatctcccacacccaaaaggccacactggtgtgcctggccacaggcttctaccccgaccacgtggagctgagctggtgggtgaatgggaaggaggtgcacagtggggtcagcacagacccgcagcccctcaaggagcagcccgccctcaatgactccagatactgcctgagcagccgcctgagggtctcggccaccttctggcagaacccccgcaaccacttccgctgtcaagtccagttctacgggctctcggagaatgacgagtggacccaggatagggccaaacccgtcacccagatcgtcagcgccgaggcctggggtagagcagactgtggcttcacctccgagtcttaccagcaaggggtcctgtctgccaccatcctctatgagatcttgctagggaaggccaccttgtatgccgtgctggtcagtgccctcgtgctgatggccatggtcaagagaaaggattccagaggctagctccaaaaccatcccaggtcattcttcatcctcacccaggattctcctgtacctgctcccaatctgtgttcctaaaagtgattctcactctgcttctcatctcctacttacatgaatacttctctcttttttctgtttccctgaagattgagctcccaacccccaagtacgaaataggctaaaccaataaaaaattgtgtgttgggaaaaaaaaaaaagagggggggccgaactgaggggcccaggttgcgttacccagaattgccgaggcgtggacccttcaaaggggcccgcaaataaaaaagggggggggccgccctaggggtcccagggttatatgggggggtgcatggggggggccaaaggctttttcccaaggggggccccaaatttttattttccgggggggggtgttttttagaagggtgtgaccgggggaaacccctttgggttacaca

SEQ ID NO: 138 - DNA, 868 bp, Homo sapiens
  misc_feature: Incyte ID No: 480187.82
  unsure 835, 854: a, t, c, g, or other
gaggcagtggtcacaactctccccagagaaggtggtgtgaggccatcacggaagatgctgctgcttctgctgcttctggggccaggctccgggcttggtgctgtcgtctctcaacatccgagctgggttatctgtaagagtggaacctctgtgaagatcgagtgccgttccctggactttcaggccacaactatgttttggtatcgtcagttcccgaaacagagtctcatgctgatggcaacttccaatgagggctccaaggccacatacgagcaaggcgtcgagaaggacaagtttctcatcaaccatgcaagcctgaccttgtccactctgacagtgaccagtgcccatcctgaagacagcagcttctacatctgcagtgctgggactagcgggaggggtggattctacgagcagtacttcgggccgggcaccaggctcacggtcacagaggacctgaaaaacgtgttcccacccgaggtcgctgtgtttgagccatcagaagcagagatctcccacacccaaaaggccacactggtgtgcctggccacaggcttctaccccgaccacgtggagctgagctggtgggtgaatgggaaggaggtgcacagtggggtcagcacagacccgcagcccctcaaggagcagcccgccctcaatgactccagatactgcctgagcagccgcctgagggtctcggccaccttctggcagaacccccgcaaccacttccgctgtcaagtccagttctacgggctctcggagaatgacgagtggacccaggatagggccaaacctgtcacccagatcgtcagcgccgaggcctggggtagancagactgtggcttcaactncggtaagtgagtct

SEQ ID NO: 139 - DNA, 1244 bp, Homo sapiens
  misc_feature: Incyte ID No: 1451415CB1
  unsure 1190: a, t, c, g, or other
agacaaggacggcccttatcctctgcttctgttcacagtgacactgatctggtaaagcccccatcctggcctgaccctgccatgggcaccaggctcctctgctgggtggtcctgggtttcctagggacagatcacacaggtgctggagtctcccagtcccctaggtacaaagtcgcaaagagaggacaggatgtagctctcaggtgtgatccaatttcgggtcatgtatcccttttttggtaccaacaggccctggggcaggggccagagtttctgacttatttccagaatgaagctcaactagacaaatcggggctgcccagtgatcgcttctttgcagaaaggcctgagggatccgtctccactctgaagatccagcgcacacagcaggaggactccgccgtgtatctctgtgccagcagcttaagcccagcgggagttgtagatacgcagtattttggcccaggcacccggctgacagtgctcgaggacctgaaaaacgtgttcccacccgaggtcgctgtgtttgagccatcagaagcagagatctcccacacccaaaaggccacactggtgtgcctggccacaggcttctaccccgaccacgtggagctgagctggtgggtgaatgggaaggaggtgcacagtggggtcagcacagacccgcagcccctcaaggagcagcccgccctcaatgactccagatactgcctgagcagccgcctgagggtctcggccaccttctggcagaacccccgcaaccacttccgctgtcaagtccagttctacgggctctcggagaatgacgagtggacccaggatagggccaaacctgtcacccagatcgtcagcgccgaggcctggggtagagcagactgtggcttcacctccgagtcttaccagcaaggggtcctgtctgccaccatcctctatgagatcttgctagggaaggccaccttgtatgccgtgctggtcagtgccctcgtgctgatggccatggtcaagagaaaggattccagaggctagctccaaaaccatcccaggtcattcttcatcctcacccaggattctcctgtacctgctcccaatctgtgttcctaaaagtgattctcactctgcttctcatctcctacttacatgaatacttctctcttttttctgtttccctgaagattgagctcccaaccccnaagtacgaaataggctaaaccaataaaaaattgtgtgttgggcctggttgcatt

SEQ ID NO: 140 - DNA, 1677 bp, Homo sapiens
  misc_feature: Incyte ID No: 480187.114
caagggacatgctgagacaactggagaaatttggattgtgagccattttgtggaggcaatgatgtcactgtgggaactgccatgagaggacagggacgtccctcctcctctgcttttgctcacagtgaccctgattgggcaaagctcccatccttccctgaccctgccatgggcaccaggctcctctgctgggcggccctctgtctcctgggagcagaactcacagaagctggagttgcccagtctcccagatataagattatagagaaaaggcagagtgtggctttttggtgcaatcctatatctggccatgctaccctttactggtaccagcagatcctgggacagggcccaaagcttctgattcagtttcagaataacggtgtagtggatgattcacagttgcctaaggatcgattttctgcagagaggctcaaaggagtagactccactctcaagatccaacctgcaaagcttgaggactcggccgtgtatctctgtgccagcagcttcttagaccgaaacaatgagcagttcttcgggccagggacacggctcaccgtgctagaggacctgaaaaacgtgttcccacccgaggtcgctgtgtttgagccatcagaagcagagatctcccacacccaaaaggccacactggtgtgcctggccacaggcttctaccccgaccacgtggagctgagctggtgggtgaatgggaaggaggtgcacagtggggtcagcacagacccgcagcccctcaaggagcagcccgccctcaatgactccagatactgcctgagcagccgcctgagggtctcggccaccttctggcagaacccccgcaaccacttccgctgtcaagtccagttctacgggctctcggagaatgacgagtggacccaggatagggccaaacctgtcacccagatcgtcagcgccgaggcctggggtagagcagactgtggcttcacctccgagtcttaccagcaaggggtcctgtctgccaccatcctctatgagatcttgctagggaaggccaccttgtatgccgtgctggtcagtgccctcgtgctgatggccatggtcaagagaaaggattccagaggctagctccaaaaccatcccaggtcattcttcatcctcacccaggattctcctgtacctgctcccaatctgtgttcctaaaagtgattctcactctgcttctcatctcctacttacatgaatacttctctcttttttctgtttccctgaagattgagctcccaacccccaagtacgaaataggctaaaccaataaaaaattgtgtgttgggcctggttgcatttcaggagtgtctgtggagttctgctcatcactgacttatcttctgatttagggaaagcagcattcccttggacatctgaagtgacagccctctttctctccacccaatgctgctttctcctgttcatcctgatggaagtcctcaaacaccatttccatacccaggcattctgggtccccactggagggttagtctgaagggcaatggctgggctttggaaaaccagcaagatgaggacagagaggaaggcacacagcaaaccataagcccttacccagtgcaggacagaggatgcgggcagacctatgggttacaatgtctggtcatttcccaattccagattaaatatgta

SEQ ID NO: 141 - DNA, 1566 bp, Homo sapiens
  misc_feature: Incyte ID No: 480187.125
agacaaggacggcccttatcctctgcttctgttcacagtgacactgatctggtaaagcccccatcctggcctgaccctgccatgggcaccaggctcctctgctgggtggtcctgggtttcctagggacagatcacacaggtgctggagtctcccagtcccctaggtacaaagtcgcaaagagaggacaggatgtagctctcaggtgtgatccaatttcgggtcatgtatcccttttttggtaccaacaggccctggggcaggggccagagtttctgacttatttccagaatgaagctcaactagacaaatcggggctgcccagtgatcgcttctttgcagaaaggcctgagggatccgtctccactctgaagatccagcgcacacagcaggaggactccgccgtgtatctctgtgccagcagcttaagcccagcgggagttgtagatacgcagtattttggcccaggcacccggctgacagtgctcgaggacctgaaaaacgtgttcccacccgaggtcgctgtgtttgagccatcagaagcagagatctcccacacccaaaaggccacactggtgtgcctggccacaggcttctaccccgaccacgtggagctgagctggtgggtgaatgggaaggaggtgcacagtggggtcagcacagacccgcagcccctcaaggagcagcccgccctcaatgactccagatactgcctgagcagccgcctgagggtctcggccaccttctggcagaacccccgcaaccacttccgctgtcaagtccagttctacgggctctcggagaatgacgagtggacccaggatagggccaaacctgtcacccagatcgtcagcgccgaggcctggggtagagcagactgtggcttcacctccgagtcttaccagcaaggggtcctgtctgccaccatcctctatgagatcttgctagggaaggccaccttgtatgccgtgctggtcagtgccctcgtgctgatggccatggtcaagagaaaggattccagaggctagctccaaaaccatcccaggtcattcttcatcctcacccaggattctcctgtacctgctcccaatctgtgttcctaaaagtgattctcactctgcttctcatctcctacttacatgaatacttctctcttttttctgtttccctgaagattgagctcccaacccccaagtacgaaataggctaaaccaataaaaaatggtgtgttgggcctggttgcatttcaggagtgtctgtggagttctgctcatcactgacctatcttctgatttagggaaagcagcattcccttggacatctgaagtgacagccctctttctctccacccaatgctgctttctcctgttcatcctgatggaagtcctcaaacaccatttccatacccaggcattctgggtccccactggagggttagtctgaagggcaatggctgggctttggaaaaccagcaagatgaggacagagaggaaggcacacagcaaaccataagcccttacccagtgcaggacagaggatgcgggcagacctatgggttacaatgtctg

SEQ ID NO: 142 - DNA, 1241 bp, Homo sapiens
  misc_feature: Incyte ID No: 480187.131
ggggttggagctcaatcttcagggaaacagaaaaaagagagaagtattcatgtaagtaggagatgagaagcagagtgagaatcacttttaggaacacagatctgggagcaggtacaggagaatcctgggtgaggatgaagaatgacctgggatggttttggagctagcctctggaatcctttctcttgaccatggccatcagcacgagggcactgaccagcacggcatacaaggtggccttccctagcaagatctcatagaggatggtggcagacaggaccccttgctggtaagactcggaggtgaagccacagtctgctctaccccaggcctcggcgctgacgatctgggtgacaggtttggccctatcctgggtccactcgtcattctccgagagcccgtagaactggacttgacagcggaagtggttgcgggggttctgccagaaggtggccgagaccctcaggcggctgctcaggcagtatctggagtcattgagggcgggctgctccttgaggggctgcgggtctgtgctgaccccactgtgcacctccttcccattcacccaccagctcagctccacgtggtcggggtagaagcctgtggccaggcacaccagtgtggccttttgggtgtgggagatctctgcttctgatggctcaaacacagcgacctcgggtgggaacacgtttttcaggtcctcgagcaccaggagccgcgtgccttctccaaaaaaacagctccccgtcctgccccctgtccggcaagctgctggcacagagatagagggccgagtcccccagcaacaaggcgttcacattcagctcagagctatagttagggaactggtgacctgagaatcgatcagggaagttgcctctctgtctctcttcctcctcataatactgaaagataaagataaactggggcccctgacccagggcctgttggtaccaggacacagtgtcatgcccagacttaggagagcatctcagagtcacttgctgtcctctcgttttgatcaggtgtgtgggactttgggtgactccagcgtccactaagcctgctcccaggagacaaagcagtgcccagcagaggagcccggggcccatggcacagaggggcaggcagcactgcacctgattcagggcttggtcctcctggggaagaacccagtgagttctgagccttgattttcctgatgggaggggtatcctgtgatgtcactgtcctgtgtcctc

SEQ ID NO: 143 - DNA, 820 bp, Homo sapiens
  misc_feature: Incyte ID No: 994560.1
  unsure 54: a, t, c, g, or other
aagactcggaagtgaaccacagtctgctctaccccagccctcggcgctgacganctgggtgacaggtttggccctatcctgggtccactcgtcattctccgagagcccgtagaactggacttgacagcggaagtggttgcgggggttctgccagaaggtggccgagaccctcaggcggctgctcaggcagtatctggagtcattgagggcgggctgctccttgaggggctgcgggtctgtgctgaccccactgtgcacctccttcccattcacccaccagctcagctccacgtggtcggggtagaacctgtggccaggcataccagtgtggccttttgggtgtgggagatctctgcttctgatggctcaaacacagcgacctcgggtgggaacacgtttttcaggtcctcgagcaccaggagccgcgtgcctggcccgaagtactgggtctctccctgtaagctgctggcacagagatacacggccgagtccccaagctctgcaggctggatcttgagagtggagtctactcctttgagcctctctgcagaaaatcgatccttaggcaactgtgaatcatctactacactctcatcctgaaattgaaccagaagctccgggccctgtcccaggatctgccggtaccagtaaagggtagcatggccagaaataggatcacaccaaaaagccacagcctggcttttctctgtaatcttatatctgggggactgggcaacttcagcttctgagagttctgcccccaggagacagagggccatccagcagagaagcctggtgctcatggcagggtcagggcagg

SEQ ID NO: 144 - DNA, 1448 bp, Homo sapiens
  misc_feature: Incyte ID No: 480187.128
aaaggagcccctgccagaggaatatccttggggagtaaaaagctgactctgccctttctccccagcccattcatcccagcccagacaattcaaatctaccttctatcaggacctagaaaggatgtaaaacggctgggtataaatatcccctgggtctggggaaactgtcaggagcagtgacatcacaggaaaaaccaccaaccaaggccaaggagaccagagcccagcacctcacccagaggaccccagtcagaggccccatctcagacccgaggctagcatgggctgcaggctgctctgctgtgcggttctctgtctcctgggagcggtccccatggaaacgggagttacgcagacaccaagacacctggtcatgggaatgacaaataagaagtctttgaaatgtgaacaacatctggggcataacgctatgtattggtacaagcaaagtgctaagaagccactggagctcatgtttgtctacagtcttgaagaacagactgaaaacaacagtgtgccaagtcgcttctcacctgaatgccccaacagctctcacttattccttcacctacacaccctgcagccagaagactcggccctgtatctctgtgccagcagccaagtaggcgaggactagcgggaggattacaatgagcggttcttcgggccagggacacggctcaccgtgctagaggacctgaaaaacgtgttcccacccgaggtcgctgtgtttgagccatcagaagcagagatctcccacacccaaaaggccacactggtgtgcctggccacaggcttctaccccgaccacgtggagctgagctggtgggtgaatgggaaggaggtgcacagtggggtcagcacagacccgcagcccctcaaggagcagcccgccctcaatgactccagatactgcctgagcagccgcctgagggtctcggccaccttctggcagaacccccgcaaccacttccgctgtcaagtccagttctacgggctctcggagaatgacgagtggacccaggatagggccaaacccgtcacccagatcgtcagcgccgaggcctggggtagagcagactgtggcttcacctccgagtcttaccagcaaggggtcctgtctgccaccatcctctatgagatcttgctagggaaggccaccttgtatgccgtgctggtcagtgccctcgtgctgatggccatggtcaagagaaaggattccagaggctagctccaaaaccatcccaggtcattcttcatcctcacccaggattctcctgtacctgctcccaatctgtgttcctaaaagtgattctcactctgcttctcatctcctacttacatgaatacttctctcttttttctgtttccctgaagattgagctcccaacccccaagtacgaaataggctaaaccaataaaaaattgtgtgttgggaaaaaaaaaaa

SEQ ID NO: 145 - DNA, 3685 bp, Homo sapiens
  misc_feature: Incyte ID No: 673766CB1
ctggcaggaagcgagggtgcggcgcaatccggagaggacgccaggacgacgcccgagttccctttcaggctagaactcttcctttttctagcttggggtagaaggcggagcgtagccccggaacccccgccctcggggtgcgaggcggcagcagggccgtcccctacatttgcatagcccctgggacgtggcgctgcacccaagcctcttctcagttggagggaactccaagtcccacagtgccacggggtggggtgcgtcactttcgctgcgttggaggctgaggagaattgagcctgggaggcgggtccggagagggctatggaaagccgccggcggggaatcccggccgtagagggacagtggataggtgcccgaggcctacagctggcctggggctcgtgtctgggcttcggacgttggggcccggtggcccaccctttccgtagttgtcccaaatggagctggaattggatgctggtgaccaagacctgctggccttcctgctagaggaaagtggagatttggggacggcacccgatgaggccgtgagggccccactggactgggcgctgccgctttctgaggtaccgagcgactgggaagtagatgatttgctgtgctccctgctgagtcccccagcgtcgttgaacattctcagctcctccaacccctgccttgtccaccatgaccacacctactccctcccacgggaaactgtctctatggatctagagagtgagagctgtagaaaagaggggacccagatgactccacagcatatggaggagctggcagagcaggagattgctaggctagtactgacagatgaggagaagagtctattggagaaggaggggcttattctgcctgagacacttcctctcactaagacagaggaacaaattctgaaacgtgtgcggaggaagattcgaaataaaagatctgctcaagagagccgcaggaaaaagaaggtgtatgttgggggtttagagagcagggtcttgaaatacacagcccagaatatggagcttcagaacaaagtacagcttctggaggaacagaatttgtcccttctagatcaactgaggaaactccaggccatggtgattgagatatcaaacaaaaccagcagcagcagcacctgcatcttggtcctactagtctccttctgcctcctccttgtacctgctatgtactcctctgacacaagggggagcctgccagctgagcatggagtgttgtcccgccagcttcgtgccctccccagtgaggacccttaccagctggagctgcctgccctgcagtcagaagtgccgaaagacagcacacaccagtggttggacggctcagactgtgtactccaggcccctggcaacacttcctgcctgctgcattacatgcctcaggctcccagtgcagagcctcccctggagtggccattccctgacctcttctcagagcctctctgccgaggtcccatcctccccctgcaggcaaatctcacaaggaagggaggatggcttcctactggtagcccctctgtcattttgcaggacagatactcaggctagatatgaggatatgtggggggtctcagcaggagcctggggggctccccatctgtgtccaaataaaaagcggtgggcaagggctggccgcagctcctgtgccctgtcaggacgactgagggctcaaacacaccacacttaatggctttctgggtcttttatttgtacccatgtgtctgtcacaccatgaatgtacctggggaaatcaactgacctccctgaacatttcacgcagtcagggaacaggtgaggaaagaaataaataagtgattctaatgctgcctaggtcaccctcaacccccatttactggcacaattgggtggagagaagggaaggggtatgattgtcctgatggctcagggttgcaggaggttcagaggggaaggaggaaaggccaggctggaggctgggctgttagcacttccctcccacagttcagacggctcactctgggctcaggtttgccatggcttcctttggtccaaacataggccctgtccttagtcctgtgccctgtttgacttttggccaggaggcctttttgtgctgctgctgttgcagggctagctgcatggcccatatgctcagtggccgcatgtaggccagtgagcggaacactcgctgctggcagtatgcctctggggtctggaaggccagacccaggcgctcccacacggtacggtagcagccttcagctgtctggaagccctcccaagtcaggccctcttggatcatggtagctgccagcccgtagaccacacccacccagacttcatcagactgcacactggatttatcagggacaccatggggctgcatcccattcacagcccccatggcccctcctgcaaaggcctggacgttcagctcaaagatagtttggagagcacggaccacatgttgggtaggaaacacctcagtgtctccttctcctaggccacaggccttcaggaaccactgtccagcacactggtcagacataacactacgagactgaggccgagagctgctgtcatagttgtaatagcggccattccacagcagtctctcataggcttcttggccccggctgaggatagaagaaaacttatcctggatgtcctgtgccccacacagagcagccatctggaccatcacagccacagctgccagccacagccctccacagtaagcactggggcctgtggtcacccatccatcataggtctggtctgcatagcctccattttcaatgagtccatcatggtccttgtcaaacttcatttcagattccatcacagctagacacacaggccacatgtccttcaggaagttttgatcacccgtgaggtaatagtcccgataaacctgcagcacaaacttcaggttcaggtccttccaatcagcagtatcatggattaaatatgcattgacgcggagccatggttcatcatctgggtccccaatatcatgggggatgacgttcctccttttcacaggtgccatcaccccactcatcaggtaccgtcgccgtgtcaggtcctccctgagagtggccagagccatgtcatactgtaggctgagctcaagtttgggccagagcatgatgagggcaaaggaagcataaaagtggacatcatatgtgttgtacatgcggtactcctggccctcaaggtagccaaatcgaccgtagtcccgtagggtggggcggaggtgacacatgtttctgcccagctcctctggtagggagtcctcaagaacttccagccacactgtgcctccatcagccaggaagtatagttcattgaacagcgcagatttgtaccaggcaggcagtgatctgtcatccaataccgggctctgccaagctgagatcctctcttcccactctgcgtatcggcacagtgcatagtggctgagggcaggtgctgcatctccatcctggccaaagaaccttgtataccgcctgtagtggacttggcctttagctccaaacatgatcctgggcatgtcccaagccagtgaaaactccaggcggcactggcctcgaggtcgcaacttgctggaaacacacacagctccagcaatgcctactcctttctgcgtaggggtgctttggcctgagctcgagccg

SEQ ID NO: 146 - DNA, 2537 bp, Homo sapiens
  misc_feature: Incyte ID No: 2008161CB1
gctccagcagcacccgagagggtcaggagaaaagcggaggaagctgggtaggccctgaggggcctcggtaagccatcatgaccacccggcaagccacgaaggatcccctcctccggggtgtatctcctacccctagcaagattccggtacgctctcagaaacgcacgcctttccccactgttacatcgtgcgccgtggaccaggagaaccaagatccaaggagatgggtgcagaaaccaccgctcaatattcaacgccccctcgttgattcagcaggccccaggccgaaagccaggcaccaggcagagacatcacaaagattggtggggatcagtcagcctcggaaccccttggaagagctcaggcctagccctaggggtcaaaatgtggggcctgggccccctgcccagacagaggctccagggaccatagagtttgtggctgaccctgcagccctggccaccatcctgtcaggtgagggtgtgaagagctgtcacctggggcgccagcctagtctggctaaaagagtactggttcgaggaagtcagggaggcaccacccagagggtccagggtgttcgggcctctgcatatttggcccccagaacccccacccaccgactggaccctgccagggcttcctgcttctctaggctggagggaccaggacctcgaggccggacattgtgcccccagaggctacaggctctgatttcaccttcaggaccttcctttcacccttccactcgccccagtttccaggagctaagaagggagacagctggcagcagccggacttcagtgagccaggcctcaggattgctcctggagaccccagtccagcctgctttctctcttcctaaaggagaacgcgaggttgtcactcactcagatgaaggaggtgtggcctctcttggtctggcccagcgagtaccattaagagaaaaccgagaaatgtcacataccagggacagccatgactcccacctgatgccctcccctgcccctgtggcccagcccttgcctggccatgtggtgccatgtccatcaccctttggacgggctcagcgtgtaccctccccaggccctccaactctgacctcatattcagtgttgcggcgtctcaccgttcaacctaaaacccggttcacacccatgccatcaacccccagagttcagcaggcccagtggctgcgtggtgtctcccctcagtcctgctctgaagatcctgccctgccctgggagcaggttgccgtccggttgtttgaccaggagagttgtataaggtcactggagggttctgggaaaccaccggtggccactccttctggaccccactctaacagaacccccagcctccaggaggtgaagattcaacgcatcggtatcctgcaacagctgttgagacaggaagtagaggggctggtagggggccagtgtgtccctcttaatggaggctcttctctggatatggttgaacttcagcccctgctgactgagatttctagaactctgaatgccacagagcataactctgggacttcccaccttcctggactgttaaaacactcagggctgccaaagccctgtcttccagaggagtgcggggaaccacagccctgccctccggcagagcctgggcccccagaggccttctgtaggagtgagcctgagataccagagccctccctccaggaacagcttgaagtaccagagccctaccctccagcagaacccaggcccctagagtcctgctgtaggagtgagcctgagataccggagtcctctcgccaggaacagcttgaggtacctgagccctgccctccagcagaacccaggcccctagagtcctactgtatgattgagcctgagataccggagtcctctcgccaggaacagcttgaggtacctgagccctgccctccagcagaacccgggccccttcagcccagcacccaggggcagtctggacccccagggccctgccctagggtagagctgggggcatcagagccctgcaccctggaacatagaagtctagagtccagtctaccaccctgctgcagtcagtgggctccagcaaccaccagcctgatcttctcttcccaacacccgctttgtgccagcccccctatctgctcactccagtctttgagacccccagcaggccaggcaggcctcagcaatctggcccctcgaaccctagccctgagggagcgcctcaaatcgtgtttaaccgccatccactgcttccacgaggctcgtctggacgatgagtgtgccttttacaccagccgagcccctccctcaggccccacccgggtctgcaccaaccctgtggctacattactcgaatggcaggatgccctgtgtttcattccagttggttctgctgccccccagggctctccatgatgagacaaccactcctgccctgccgtacttcttccttttagcccttatttattgtcggtctgcccatgggactgggagccgcccacttttgtcctcaataaagtttctaaagtaaaaaaaaaa

SEQ ID NO: 147 - DNA, 1121 bp, Homo sapiens
  misc_feature: Incyte ID No: 233427.16
cggacttcagtagagccaggcctcaggattgctcctggagaccccagtccagcctgctttctctcttcctaaaggagaacgcgaggttgtcactcactcagatgaaggaggtgtggcctctcttggtctggcccagcgagtaccattaagagaaaaccgagaaatgtcacataccagggacagccatgactcccacctgatgccctcccctgcccctgtggcccagcccttgcctggccatgtggtgccatgtccatcaccctttggacgggctcagcgtgtaccctccccaggccctccaactctgacctcatattcagtgttgcggcgtctcaccgttcaacctaaaacccggttcacacccatgccatcaacccccagagttcagcaggcccagtggctgcgtggtgtctcccctcagtcctgctctgaagatcctgccctgccctgggtaagtatcagaagcttccccctactgagatcccttgccctgtgctgccagcctggaggcccaggagtttgaggcacacgtgctttctgtggccaggcatggtggctcacacctgtaatcccagcactttgggaggctgaggtaggaggattgcttgagctcagatctttgagaccagcctgggcaacatagtgagaccctgtctccactaaaattttaaaaattagaaagtgctctctggaaaagctgcctaactctcactgcttctctgctgcccctcctaatgtacatctagggcctctcagttaggggcttcaatccattcctcatgagggtgggactcaggctggtctttctcctgccccagcctggcttgcttgtgtgccttgttccttggtgacaggagcaggttgccgtccggttgtttgaccaggagagttgtataaggtcactggagggttctgggaaaccaccggtggccactccttctggaccccactctaacagaacccccagcctccaggaggtgaagattcaacgcatcggtatcctgcaacagctgttgagacaggaagtagaggggctggtagggggccagtgtgtccctcttaatggaggctcttctctggatatggttgaacttcagcccctgctgactgagatttctaga

SEQ ID NO: 148 - DNA, 3914 bp, Homo sapiens
  misc_feature: Incyte ID No: 3331519CB1
ccgacccacactgaccaacacaggctgagcagtcaggcccacagcatctgaccccaggcccagctcgtcctggctggcctgggtcggcctctggagtatggtctggcgggtgccccctttcttgctccccatcctcttcttggcttctcatgtgggcgcggcggtggacctgacgctgctggccaacctgcggctcacggacccccagcgcttcttcctgacttgcgtgtctggggaggccggggcggggaggggctcggacgcctggggcccgcccctgctgctggagaaggacgaccgtatcgtgcgcaccccgcccgggccacccctgcgcctggcgcgcaacggttcgcaccaggtcacgcttcgcggcttctccaagccctcggacctcgtgggcgtcttctcctgcgtgggcggtgctggggcgcggcgcacgcgcgtcatctacgtgcacaacagccctggagcccacctgcttccagacaaggtcacacacactgtgaacaaaggtgacaccgctgtactttctgcacgtgtgcacaaggagaagcagacagacgtgatctggaagagcaacggatcctacttctacaccctggactggcatgaagcccaggatgggcggttcctgctgcagctcccaaatgtgcagccaccatcgagcggcatctacagtgccacttacctggaagccagccccctgggcagcgccttctttcggctcatcgtgcggggttgtggggctgggcgctgggggccaggctgtaccaaggagtgcccaggttgcctacatggaggtgtctgccacgaccatgacggcgaatgtgtatgcccccctggcttcactggcacccgctgtgaacaggcctgcagagagggccgttttgggcagagctgccaggagcagtgcccaggcatatcaggctgccggggcctcaccttctgcctcccagacccctatggctgctcttgtggatctggctggagaggaagccagtgccaagaagcttgtgcccctggtcattttggggctgattgccgactccagtgccagtgtcagaatggtggcacttgtgaccggttcagtggttgtgtctgcccctctgggtggcatggagtgcactgtgagaagtcagaccggatcccccagatcctcaacatggcctcagaactggagttcaacttagagacgatgccccggatcaactgtgcagctgcagggaaccccttccccgtgcggggcagcatagagctacgcaagccagacggcactgtgctcctgtccaccaaggccattgtggagccagagaagaccacagctgagttcgaggtgccccgcttggttcttgcggacagtgggttctgggagtgccgtgtgtccacatctggcggccaagacagccggcgcttcaaggtcaatgtgaaagtgccccccgtgcccctggctgcacctcggctcctgaccaagcagagccgccagcttgtggtctccccgctggtctcgttctctggggatggacccatctccactgtccgcctgcactaccggccccaggacagtaccatggactggtcgaccattgtggtggaccccagtgagaacgtgacgttaatgaacctgaggccaaagacaggatacagtgttcgtgtgcagctgagccggccaggggaaggaggagagggggcctgggggcctcccaccctcatgaccacagactgtcctgagcctttgttgcagccgtggttggagggctggcatgtggaaggcactgaccggctgcgagtgagctggtccttgcccttggtgcccgggccactggtgggcgacggtttcctgctgcgcctgtgggacgggacacgggggcaggagcggcgggagaacgtctcatccccccaggcccgcactgccctcctgacgggactcacgcctggcacccactaccagctggatgtgcagctctaccactgcaccctcctgggcccggcctcgccccctgcacacgtgcttctgccccccagtgggcctccagccccccgacacctccacgcccaggccctctcagactccgagatccagctgacatggaagcacccggaggctctgcctgggccaatatccaagtacgttgtggaggtgcaggtggctgggggtgcaggagacccactgtggatagacgtggacaggcctgaggagacaagcaccatcatccgtggcctcaacgccagcacgcgctacctcttccgcatgcgggccagcattcaggggctcggggactggagcaacacagtagaagagtccaccctgggcaacgggctgcaggctgagggcccagtccaagagagccgggcagctgaagagggcctggatcagcagctgatcctggcggtggtgggctccgtgtctgccacctgcctcaccatcctggccgcccttttaaccctggtgtgcatccgcagaagctgcctgcatcggagacgcaccttcacctaccagtcaggctcgggcgaggagaccatcctgcagttcagctcagggaccttgacacttacccggcggccaaaactgcagcccgagcccctgagctacccagtgctagagtgggaggacatcacctttgaggacctcatcggggaggggaacttcggccaggtcatccgggccatgatcaagaaggacgggctgaagatgaacgcagccatcaaaatgctgaaagagtatgcctctgaaaatgaccatcgtgactttgcgggagaactggaagttctgtgcaaattggggcatcaccccaacatcatcaacctcctgggggcctgtaagaaccgaggttacttgtatatcgctattgaatatgccccctacgggaacctgctagattttctgcggaaaagccgggtcctagagactgacccagcttttgctcgagagcatgggacagcctctacccttagctcccggcagctgctgcgtttcgccagtgatgcggccaatggcatgcagtacctgagtgagaagcagttcatccacagggacctggctgcccggaatgtgctggtcggagagaacctagcctccaagattgcagacttcggcctttctcggggagaggaggtttatgtgaagaagacgatggggcgtctccctgtgcgctggatggccattgagtccctgaactacagtgtctataccaccaagagtgatgtctggtcctttggagtccttctttgggagatagtgagccttggaggtacaccctactgtggcatgacctgtgccgagctctatgaaaagctgccccagggctaccgcatggagcagcctcgaaactgtgacgatgaagtgtacgagctgatgcgtcagtgctggcgggaccgtccctatgagcgacccccctttgcccagattgcgctacagctaggccgcatgctggaagccaggaaggcctatgtgaacatgtcgctgtttgagaacttcacttacgcgggcattgatgccacagctgaggaggcctgagctgccatccagccagaacgtggctctgctggccggagcaaactctgctgtctaacctgtgaccagtctgacccttacagcctctgacttaagctgcctcaaggaatttttttaacttaagggagaaaaaaagggatctggggatggggtgggcttaggggaactgggttcccatgctttgtaggtgtctcatagctatcctgggcatccttctttctagttcagctgccccacaggtgtgtttcccatcccactgctcccccaacacaaacccccactccagctccttcgcttaagccagcactcacaccactaacatgccctgttcagctactcccactcccggcctgtcattcagaaaaaaataaatgttctaataagctccaaaaaaaaaaaaaaa

SEQ ID NO: 149 - DNA, 1705 bp, Homo sapiens
  misc_feature: Incyte ID No: 1327007.1
  unsure 1683: a, t, c, g, or other
cgtggacgccgccgaagaagcatcgttaaagtctctcttcaccctgccgtcatgtctaagtcagagtctcctaaagagcccgaacagctgaggaagctcttcattggagggttgagctttgaaacaactgatgagagcctgaggagccattttgagcaatggggaacgctcacggactgtgtggtaatgagagatccaaacaccaagcgctccaggggctttgggtttgtcacatatgccactgtggaggaggtggatgcagctatgaatgcaaggccacacaaggtggatggaagagttgtggaaccaaagagagctgtctccagagaagattctcaaagaccaggtgcccacttaactgtgaaaaagatatttgttggtggcattaaagaagacactgaagaacatcacctaagagattattttgaacagtatggaaaaattgaagtgattgaaatcatgactgaccgaggcagtggcaagaaaaggggctttgcctttgtaacctttgacgaccatgactccgtggataagattgtcattcagaaataccatactgtgaatggccacaactgtgaagttagaaaagccctgtcaaagcaagagatggctagtgcttcatccagccaaagaggtcgaagtggttctggaaactttggtggtggtcgtggaggtggtttcggtgggaatgacaacttcggtcgtggaggaaacttcagtggtcgtggtggctttggtggcagccgtggtggtggtggatatggtggcagtggggatggctataatggatttggtaatgatggaagcaattttggaggtggtggaagctacaatgattttgggaattacaacaatcagtcttcaaattttggacccatgaagggaggaaattttggaggcagaagctctggcccctatggcggtggaggccaatactttgcaaaaccacgaaaccaaggtggctatggcggttccagcagcagcagtagctatggcagtggcagaagattttaattaggaaacaaagcttagcaggagaggagagccagagaagtgacagggaagctacaggttacaacagatttgtgaactcagccaagcacagtggtggcagggcctagctgctacaaagaagacatgttttagacaaatactcatgtgtatgggcaaaaaactcgaggactgtatttgtgactaattgtataacaggttattttagtttctgttctgtggaaagtgtaaagcattccaacaaagggttttaatgtagatttttttttttgcaccccatgctgttgattgctaaatgtaacagtctgatcgtgacgctgaataaatgtcttttttttaatgtgctgtgtaaagttagtctactcttaagccatcttggtaaatttccccaacagtgtgaagttagaattccttcagggtgatgccaggttctatttggaatttatatacaacctgcttgggtggagaagccattgtcttcggaaaccttggtgtagttgaactgatagttattgttgtgacctgaagttcaccactgaaagagattacccaagcaaaatcatgtaattattggttataaatatgattgttggcacatcctatgcaatatatctaaattgaataatggcaccaggtaaaattatagatgggaatgaagcttgtgtatcatcnattatcatgtgtaattaataaa

SEQ ID NO: 150 - DNA, 1113 bp, Homo sapiens
  misc_feature: Incyte ID No: 130011CB1
aaccttccacgcgcacgaactcagccaacgatttctgatagatttttgggagtttgaccagagatgcaaggggtgaaggagcgcttcctaccgttagggaactctggggacagagcgccccggccgcctgatggccgaggcagggtgcgacccaggacccaggacggcgtcgggaaccataccatggcccggatccccaagaccctaaagttcgtcgtcgtcatcgtcgcggtcctgctgccagtcctagcttactctgccaccactgcccggcaggaggaagttccccagcagacagtggccccacagcaacagaggcacagcttcaagggggaggagtgtccagcaggatctcatagatcagaacatactggagcctgtaacccgtgcacagagggtgtggattacaccaacgcttccaacaatgaaccttcttgcttcccatgtacagtttgtaaatcagatcaaaaacataaaagttcctgcaccatgaccagagacacagtgtgtcagtgtaaagaaggcaccttccggaatgaaaactccccagagatgtgccggaagtgtagcaggtgccctagtggggaagtccaagtcagtaattgtacgtcctgggatgatatccagtgtgttgaagaatttggtgccaatgccactgtggaaaccccagctgctgaagagacaatgaacaccagcccggggactcctgccccagctgctgaagagacaatgaacaccagcccagggactcctgccccagctgctgaagagacaatgaccaccagcccggggactcctgccccagctgctgaagagacaatgaccaccagcccggggactcctgccccagctgctgaagagacaatgaccaccagcccggggactcctgcctcttctcattacctctcatgcaccatcgtagggatcatagttctaattgtgcttctgattgtgtttgtttgaaagacttcactgtggaagaaattccttccttacctgaaaggttcaggtaggcgctggctgagggcggggggcgctggacactctctgccctgcctccctctgctgtgtcccacagacagaaacgcctgcccctgccccaaaaaaaaaaaa

SEQ ID NO: 151 - DNA, 2089 bp, Homo sapiens
  misc_feature: Incyte ID No: 4260562CB1
ccgccccgcgcccggcctcggcagccgcctgtcgccgcgggagcagccgctatctctgtgtgtccgcgtgtgcgcccggtccccgcctgccgcaccatggagagctaccacaagcctgaccagcagaagctgcaggccttgaaggacacggccaaccgcctacgtatcagctccatccaggccaccactgcggcgggctctggccaccccacgtcatgctgcagcgccgcagagatcatggctgtcctctttttccacaccatgcgctacaagtcccaggacccccggaatccgcacaatgaccgctttgtgctctccaagggccatgcagctcccatcctctacgcggtctgggctgaagctggtttcctggccgaggcggagctgctgaacctgaggaagatcagctccgacttggacgggcacccggtcccgaaacaagctttcaccgacgtggccactggctccctgggccagggcctcggggccgcttgtgggatggcctacaccggcaaatacttcgacaaggccagctaccgagtctattgcttgctgggagacggggagctgtcagagggctctgtatgggaggccatggccttcgccagcatctataagctggacaaccttgtggccattctagacatcaatcgcctgggccagagtgacccggccccactgcagcaccagatggacatctaccagaagcggtgcgaggccttcggttggcatgccatcatcgtggatggacacagcgtggaggagctgtgcaaggcctttggccaggccaagcaccagccaacagccatcattgccaagaccttcaagggccgagggatcacgggggtagaagataaggagtcttggcatgggaagcccctccccaaaaacatggctgagcagatcatccaggagatctacagccagatccagagcaaaaagaagatcctggcaacccctccacaggaggacgcaccctcagtggacattgccaacatccgcatgcccagcctgcccagctacaaagttggggacaagatagccacccgcaaggcctacgggcaggcactggccaagctgggccatgccagtgaccgcatcatcgccctggatggggacaccaaaaattccaccttctcggagatcttcaaaaaggagcacccggaccgcttcatcgagtgctacattgctgagcagaacatggtgagcatcgcggtgggctgtgccacccgcaacaggacggtgcccttctgcagcacttttgcagccttcttcacgcgggcctttgaccagattcgcatggccgccatctccgagagcaacatcaacctctgcggctcccactgcggcgtttccatcggggaagacgggccctcccagatggccctagaagatctggctatgtttcggtcagtccccacatcaactgtcttttacccaagtgatggcgttgctacagagaaggcagtggaactagccgccaatacaaagggtatctgcttcatccggaccagccgcccagaaaatgccatcatctataacaacaatgaggacttccaggtcggacaagccaaggtggtcctgaagagcaaggatgaccaggtgaccgttatcggggctggggtgaccctgcacgaggccttggccgctgccgaactgctgaagaaagaaaagatcaacatccgcgtgctggaccccttcaccatcaagcccctggacagaaaactcattctcgacagcgctcgtgccaccaagggcaggatcctcaccgtggaggaccattattatgaaggtggcattggtgaggctgtgtccagtgcagtagtgggcgagcctggcatcactgtcacccacctggcagttaaccgggtaccaagaagtgggaagccggctgagctgctgaagatgtttggtatcgacagggatgccattgcacaagctgtgaggggcctcatcaccaaggcctagggcgggtatgaagtgtggggcgggggtctatacattcctgagattctgggaaaggtgctcaaagatgtactgagaggaggggtaaatatatgttttgagaaaaatgaaaaaaaaaaaaaaa

SEQ ID NO: 152 - DNA, 2592 bp, Homo sapiens
  misc_feature: Incyte ID No: 1330214.11
  unsure 1131, 1929: a, t, c, g, or other
gaagtaggccgcccggtagatgatgatgccctgcacggagacactgaagccctggtacaggccccggatgccgtcggacttggtgatcttcaccaggcagtctcccagtgcctcggaactcgcgctctgagccagcgacgccctgccattcactctccgcgcccgttctccggctgtcctcccgttccgctgcccgccctgccaccatgacggaacaggccatctccttcgccaaagacttcttggccggaggcatgcgccgccgccatctccaagacggccgtggctccgatcgagcggggtcaagctgctgctgcaggtccagcacgccagcaagcagatcgccgccgacaagcggtacaagggcatcgtggactgcattgtccgcatccccaaggagcagggcgtgctgtccttctggaggggcaaccttgccaacgtcattcgctacttccccactcaagccctcaacttcgccttcaaggataagtacaagcagatcttcctggggggcgtggacaagcacacgcagttctggaggtactttgcgggcaacctggcctccggcggtgcggccggcgcgacctccctctgcttcgtgtacccgctggattttgccagaacccgcctggcagcggacgtgggaaagtcaggcacagagcgcgagttccgaggcctgggagactgcctggtgaagatcaccaagtccgacggcatccggggcctgtaccagggcttcagtgtctccgtgcagggcatcatcatctaccgggcggcctacttcggcgtgtacgatacggccaagggcatgctccccgaccccaagaacacgcacatcgtggtgagctggatgatcgcgcagaccgtgacggccgtggccggcgtggtgtcctaccccttcgacacggtgcggcggcgcatgatgatgcagtccgggcgcaaaggagctgacatcatgtacacgggcaccgtcgactgttggaggaagatcttcagagatgaggggggcaaggccttcttcaagggtgcgtggtccaacgtcctgcggggcatggggggcgccttcgtgctggtcctgtacgacgagctcaagaaggtgatctaagggccgcggcctccttccacacacanacacacaccaggggaaccaagagaaccacgtagaatcctcaaccgtgcggaccatcaaccttcgagaaattccagttgtctttttcccagccgcatcctgcctgtagatggccggggaaggctctagaaaaggggcgcattgcgatccaaccatcggcagccgattccgtgtcttgatcacggggtgggagggaaccgtggcgtccctgcgtggggcccatgggtgagacactccagtactgagacctagagtccagatgcttgtaggagccaagtcgtgttctaagtatttatttaaaacaaaagaatcacgttttcccatttgtacttcagcgctagcccctgttttgcacagccgagtactggcgagtatgttctatgttgggcctcctgctgcaaaacaataaacagaggacgcagaggtcctcctgcctggccacgcacctctccacagggcggcctggggtctggagatgggcgctgggcccacgggacgcagatggggccacgctctgcccgtggctggcccacgttcctggtctgcagtgctgcctcctccccagcacccctggggcacagagggcagggtcacagctgggaagaggcggggggtagaaaccaaggctggcagaagtgtagccgggctccctgataaatgctggaggaccccagggcacctgcacttactgtaccctctctgagagcatttgtatgatctcatgtctcagctctggaggctggaggtcccagaaaaccaaggtatgggtaagattcagtctctgggtgagtacccagttnctggcttctagatggcgcctttttccctgtgtgtcctcagatgatggatgaggccagggtgctctctggagtcctttctgtaagggcactgatcccatccatgaggcctcatgactcccaaagacccccacttcccaacgccatcacttgggagaggggcgttttcagcgtgaatcttggggaaactgaaacaggcgtgacaccctgcgttcctctccacctcctgtagctcccgagggccactccagcccccattccagcatgaacagtggagtcggtcggggtccccagagtggcagctgtgtgtccgcgggttcacccgtgagaatccaccacaaggggtacccaccgcgaggcacgacagcttccttcaagctctttctgctcaaacattcatcgcggggcaagaaaagccgtgttgaatctctaccgggccgaaccttgggccttggtgtcagcgcacggcagggccacagagagctacagccctggggttccagagccggctctcccgtgctctccagaaatcccagccatagtaaaaagaatctgttttttgagatggagtctcgtctcgcccaggctggagtacagcggttgcagtgaactgagattgcatcaactgcacttcaaacctgggagacagatcgtgactccatctcc

SEQ ID NO: 153 - DNA, 2077 bp, Homo sapiens
  misc_feature: Incyte ID No: 1701228CB1
  unsure 340, 414: a, t, c, g, or other
gcggtaaggaatgcctttctggcttcagcagcctggaggatggggacgtctgggcgttgactcctgggttggaacttttcagcccaccccttcccccagtctcttgccactgggtctctctgcttgggcctcagggatctctaggttcttcactccctctccaagcatcctcctccgggaagccttccctcactgagtccgtttccaatgggctggaactgcggtcccccgctgttctctgcggccgtctagggatggcgctcctgcctactccggaccatccctgcttggactgaaagcctgggcttcggcggggcgggcgggcagagggcggacggangcgcaggaggggcctggcagcagagaaacggtgcccgcggccagccccgcccctacctgtggaagcccagcacngcctcccgcggataaaaggtgcggagtgtccccgaggtcagcgagtgcgcgctcctcctcgcccgccgctaggtccatcccggcccagccaccatgtccatccacttcagctccccggtattcacctcgcgctcagccgccttctcgggccgcggcgcccaggtgcgcctgagctccgctcgccccggcggccttggcagcagcagcctctacggcctcggcgcctcacggccgcgcgtggccgtgcgctctgcctatgggggcccggtgggcgccggcatccgcgaggtcaccattaaccagagcctgctggccccgctgcggctggacgccgacccctccctccagcgggtgcgccaggaggagagcgagcagatcaagaccctcaacaacaagtttgcctccttcatcgacaaggtgcggtttctggagcagcagaacaagctgctggagaccaagtggacgctgctgcaggagcagaagtcggccaagagcagccgcctcccagacatctttgaggcccagattgctggccttcggggtcagcttgaggcactgcaggtggatgggggccgcctggaggcggagctgcggagcatgcaggatgtggtggaggacttcaagaataagtacgaagatgaaattaaccgccgcacagctgctgagaatgagtttgtggtgctgaagaaggatgtggatgctgcctacatgagcaaggtggagctggaggccaaggtggatgccctgaatgatgagatcaacttcctcaggaccctcaatgagacggagttgacagagctgcagtcccagatctccgacacatctgtggtgctgtccatggacaacagtcgctccctggacctggacggcatcatcgctgaggtcaaggcgcagtatgaggagatggccaaatgcagccgggctgaggctgaagcctggtaccagaccaagtttgagaccctccaggcccaggctgggaagcatggggacgacctccggaatacccggaatgagatttcagagatgaaccgggccatccagaggctgcaggctgagatcgacaacatcaagaaccagcgtgccaagttggaggccgccattgccgaggctgaggagcgtggggagctggcgctcaaggatgctcgtgccaagcaggaggagctggaagccgccctgcagcgggccaagcaggatatggcacggcagctgcgtgagtaccaggaactcatgagcgtgaagctggccctggacatcgagatcgccacctaccgcaagctgctggagggcgaggagagccggttggctggagatggagtgggagccgtgaatatctctgtgatgaattccactggtggcagtagcagtggcggtggcattgggctgaccctcgggggaaccatgggcagcaatgccctgagcttctccagcagtgcgggtcctgggctcctgaaggcttattccatccggaccgcatccgccagtcgcaggagtgcccgcgactgagccgcctcccaccactccactcctccagccaccacccacaatcacaagaagattcccacccctgcctcccatgcctggtcccaagacagtgagacagtctggaaagtgatgtcagaatagcttccaataaagcagcctcattctgaggcctgagtgatcc

SEQ ID NO: 154 - DNA, 1672 bp, Homo sapiens
  misc_feature: Incyte ID No: 1659219CB1
gccgtggtcccgtagctaccggtcgcgtcgccgtgggcgacgtgcccgcttccaaaatggcggcggcggcggtatctggtgcgcttggccgggcgggctggaggctcctgcagctgcgatgcctgcccgtggcccgttgccgacaagccctggtgccgcgtgccttccatgcttcagctgtggggctaaggtcttcagatgagcagaagcagcagcctcccaactcattttctcagcagcattctgagacacagggggcagaaaaacctgatccagagtcttctcattcaccccccaggtatacagaccagggcggcgaggaggaggaggactatgaaagtgaggagcagttgcagcaccgcatcctgacggcagcccttgagtttgtgcccgcccacgggtggacagcagaggcgattgcagaaggagcccagtctctgggtctctccagtgcagcagccagcatgttcgggaaggatggcagtgagctaatactgcattttgtgacccagtgcaatacccggctcacacgtgtgctagaagaggagcagaagctggtacagttgggccaggcggagaagaggaagacagaccagttcctgagggatgcagtggaaaccagactgagaatgctgatcccatacattgagcactggccccgggccctcagcatcctcatgctccctcacaacatcccgtccagcctgagcctgctcaccagcatggtggatgacatgtggcattacgctggggaccagtccactgattttaactggtacacccgccgagccatgctggctgccatctacaacacaacagagctggtgatgatgcaggactcctctccagactttgaggacacttggcgcttcctggaaaaccgggttaatgatgcaatgaacatgggccacactgccaagcaggtaaagtccacaggagaggcactggtgcaaggactcatgggtgcagcagtgacgctcaagaacttgacaggtctaaaccagcgtcggtgagaggaaggggtataagctacaatgcctagaagagaatgagcggacagattgaaagagctttgaaaagtataaggtgccatccacataacctggtgttcacgagaacacactaaaggactcctgagtcactaccacagccacctggaaaccacaaggcatttgatgctaccgttctggtcagggattgggctgcttcttcagttcctaataccagaccaagcctcctgatgcctttctgcactgcaactgtgtgattgaaaaatgagatgttcatccaagcagtcaagccacagaaacccagcatgtccctgtcacaatctcatgggcaccttgatcatgtcttaaccttcccttaaccttggggctcccaagccagagtcaaggtctgacgccacctcaaggtgacagctcatctccagcacagcacaggcgtgtgcacacagaggtgttccttgaagccccctccctctcaggtgtcctgagatgctgctcctgggagccccctcagaaaactgcctcacctgagacaagtgcctgctggacagaggtgtgattccaggcctggtgtcacatgacaccagcatgcattgcaggattattagtgtattttgagtctgtaaaaataataaatatgtttgaagtaaaaaaaaaaaaaaagg

SEQ ID NO: 155 - DNA, 2225 bp, Homo sapiens
  misc_feature: Incyte ID No: 039857CB1
ctgtcagttggacccctcacctggcctccagggaagaatgcagagaaaagcaaggagagactctagttaagaggtgctggctgcggggatccagacagggcacattgggggcatggaagtgccagggtggttttcaggagctctggtgaagtgggtggagcatcagcgtttgctcagttaagggagaggtagagaggggcccgtgaagtcctttgtcacttctcttgccttagtgtgcctcccaatactcccttcttcctgcccccacaccccatccccagctagcccaagctccaggtcaggaggggagggtgctgggcctgacatggctatataccctcccaggagtaaaagccaagcaagaggttgtttttgccaagaatcacagaatgttagagctgacaggacccttgaaggtcacttagccttcttaggcaaacgcctgcaaaacagaagcctggagaggggagtgacctgctcagagtcattgcagagccgggatggggaccaggtctcccatctcctactttatgacgccctcttccctcttgatgatgtcttttcaaagcaaatgaagtgccttttcccgaggctggggctgggggtggctgggaggggaagggaagggagaggcaagctggctgtgaactgtcctgttgtggggctggagctgctcccacctccctgacctacccctgctgcaccattcccccagctgggctggaaggttccataactggccagctgcccccataactggcagcattcccagacccagggtactctaataggggcggctcaggcactgagactaccgctcaaccccagggtggttttcaggagtccgaggtagccttcaatcactggactccatggccttcccttcgtgttgaccggaccttccttccagggcttttcctttgggggaggcggagaggggagaagaaggaagggaagggcagaaggaaggagggaagaaaagaaagcaaaggaacagaaggaaggaaagaaagatgggaggaagtgcagcaggaatagcaccctctccccgggaggccctagcttccgtgaggggccatcaccagccattccttggagggggctttctccccttttgcttgagcagggttcccaggagggagaaagagaagacaagagcctgatgcccaactttgtgtgtgtggggacgggggagtcagggccccccaagtcccacaatagccccaatgtttgcctatccacctcccccaagcccctttacctatgctgctgctaacgctgctgctgctgctgctgctgcttaaaggctcatgcttggagtggggactggtcggtgcccagaaagtctcttctgccactgacgcccccatcagggattgggccttctttcccccttcctttctgtgtctcctgcctcatcggcctgccatgacctgcagccaagcccagccccgtggggaaggggagaaagtgggggatggctaagaaagctgggagatagggaacagaagagggtagtgggtgggctaggggggctgccttatttaaagtggttgtttatgattcttatactaatttatacaaagatattaaggccctgttcattaagaaattgttcccttcccctgtgttcaatgtttgtaaagattgttctgtgtaaatatgtctttataataaacagttaaaagctgacagttcgcccttactcttggaggtcatgttcaggaggggcattcctttcccctgggggtcatgggtgtccccatgcccacatattgcacgtgcagggaggtaagtgcctgcatcccaaatcggttctaggtcaactggcctcaaactgatttgccatgagctcacaaaatgaatccctatgcttaatgaccaggtcacataaaatccagcccacttacaggttttctggcatctgtttgggtgtcctaatttttttggcagtgtcatttgaagaatttttttaaagcagtttatttaagaacatactgattaaatgcaggatcgctactaaaaattgttttgtatccttggtgggtgtcttctgctattttatctacttttgaacactttcaggactttttagccagtttgcctttcttgaaaaatgttatgttttcagcaataaatacatttgataatgactttgtttgtatcattttatgtttcacaaagtagagttgcttgatgaatgagatagcctgaaaaataaaatg

SEQ ID NO: 156 - DNA, 1633 bp, Homo sapiens
  misc_feature: Incyte ID No: 1265962CB1
gagacacgcggcggtgtcctgtgttggccatggccgactacctgattagtgggggcacgtcctacgtgccagacgacggactcacagcacagcagctcttcaactgcggagacggcctcacctacaatgactttctcattctccctgggtacatcgacttcactgcagaccaggtggacctgacttctgctctgaccaagaaaatcactcttaagaccccactggtttcctctcccatggacacagtcacagaggctgggatggccatagcaatggcgcttacaggcggtattggcctcatccaccacaactgtacacctgaattccaggccaatgaagttcggaaagtgaagaaatatgaacagggattcatcacagaccctgtggtcctcagccccaaggatcgcgtgcgggatgtttttgaggccaaggcccggcatggtttctgcggtatcccaatcacagacacaggccggatggggagccgcttggtgggcatcatctcctccagggacattgattttctcaaagaggaggaacatgactgtttcttggaagagataatgacaaagagggaagacttggtggtagcccctgcaggcatcacactgaaggaggcaaatgaaattctgcagcgcagcaagaagggaaagttgcccattgtaaatgaagatgatgagcttgtggccatcattgcccggacagacctgaagaagaatcgggactacccactagcctccaaagatgccaagaaacagctgctgtgtggggcagccattggcactcatgaggatgacaagtataggctggacttgctcgcccaggctggtgtggatgtagtggttttggactcttcccagggaaattccatcttccagatcaatatgatcaagtacatcaaagacaaataccctaatctccaagtcattggaggcaatgtggtcactgctgcccaggccaagaacctcattgatgcaggtgtggatgccctgcgggtgggcatgggaagtggctccatctgcattacgcaggaagtgctggcctgtgggcggccccaagcaacagcagtgtacaaggtgtcagagtatgcacggcgctttggtgttccggtcattgctgatggaggaatccaaaatgtgggtcatattgcgaaagccttggcccttggggcctccacagtcatgatgggctctctcctggctgccaccactgaggcccctggtgaatacttcttttccgatgggatccggctaaagaaatatcgcggtatgggttctctcgatgccatggacaagcacctcagcagccagaacagatatttcagtgaagctgacaaaatcaaagtggcccagggagtgtctggtgctgtgcaggacaaagggtcaatccacaaatttgtcccttacctgattgctggcatccaacactcatgccaggacattggtgccaagagcttgacccaagtccgagccatgatgtactctggggagcttaagtttgagaagagaacgtcctcagcccaggtggaaggtggcgtccatagcctccattcgtatgagaagcggcttttctgaaaagggatccagcacacctcctcggtttttttttcaataaaagtttagaaagaaaaaaa

SEQ ID NO: 157 - DNA, 1453 bp, Homo sapiens
  misc_feature: Incyte ID No: 1555032CB1
cagaaatctccaggcaacaaaggatcattggtttatgcaggaattaaatcaattgtaaagtcatcgttgggaatggtggaaagcagcagacataattggagtgggttggataagcaaagtgatattcaaaatttaaatgaagagagaatcttagctttacagctttgtgggtggataaagaaaggaacggatgtagacgtggggccatttttgaactcccttgtacaagaaggggaatgggaaagagctgctgctgtggcattgttcaacttggatattcgccgagcaatccaaatcctgaatgaaggggcatcttctgaaaaaggagatctgaatctcaatgtggtagcaatggctttatcgggttatacggatgagaagaactccctttggagagaaatgtgtagcacactgcgattacagctaaataacccgtatttgtgtgtcatgtttgcatttctgacaagtgaaacaggatcttacgatggagttttgtatgaaaacaaagttgcagtacgtgacagagtggcatttgcttgtaaattccttagtgatactcagttaaatagatacatcgaaaagttgaccaatgaaatgaaagaggctggaaatttggaaggaattttgcttacaggccttactaaagatggagtggacttaatggagagttatgttgatagaactggagatgttcaaacagcaagttactgtatgttacagggttcacctttagatgttcttaaagatgaaagggttcagtactggattgagaattatagaaatttattagatgcctggaggttttggcataaacgagctgaatttgatattcacaggagtaagttggatcccagttccaagcctttagcacaagtttttgtgagttgcaatttctgtggcaagtcaatctcctacagctgttcagctgtgcctcatcagggcagaggttttagtcagtatggtgtgagtggctcaccaacgaaatctaaagtcacaagttgtcctggctgtcgaaaaccacttcctcgatgtgcgctttgtctcattaatatgggaacaccagtttctagctgtcctggaggaaccaaatcagatgaaaaagtggacttgagcaaggacaaaaaattagcccaatttaacaactggtttacatggtgtcataattgcaggcacggtggacatgctggacatatgcttagttggttcagggaccatgcagagtgccctgtgtctgcatgcacgtgtaaatgtatgcagttggatacaacggggaatctggtacctgcagagactgtccagccataaaatgttaccaccttaagagaacccttcaagtgtggagctttctagtaggtgtccttcatagctcagaaacatacctcagaacaagccattcatgacttacctgtaatgggaaaataaatcattctatcagatcaaaaaaaaaaaaaaa

SEQ ID NO: 158 - DNA, 1818 bp, Homo sapiens
  misc_feature: Incyte ID No: 2784232CB1
tcccaatcagtttccagccaacaccagggtgtcctagtccgcagaggtgtgggggacacactccataatctctacttttctttttgtgcagctgagtcatggagctttcagccccagcacatggctcctccttaactgcgtctgctcaacctccctcagccctgtgaacagcatccccgcacacagacgcagagcaggactctctctgctgccacttcaccttcctgagagaggaccagcggccagagcctcagtgactgccaccctggaggacagggcacaacaaccgtttctggagagaatgggaggattccagaggggcaaatatggaactatggctgaaggtagatcagaagataacttgtctgcaacaccaccggcattgaggattatcctagtgggcaaaacaggctgcgggaaaagtgccacagggaacagcatccttggccagcccgtgtttgagtccaagctgagggcccagtcagtgaccaggacgtgccaggtgaaaacaggaacatggaacgggaggaaagtcctggtggttgacacgccctccatctttgagtcacaggccgatacccaagagctgtacaagaacatcggggactgctacctgctctctgccccggggccccacgtcctgcttctggtgatccagctggggcgtttcactgctcaggacacagtggccatcaggaaggtgaaagaggtctttgggacaggggccatgagacatgtggtcatcctcttcacccacaaagaggacttagggggccaggccctggatgactatgtagcaaacacggacaactgcagcctgaaagacctggtgcgggagtgtgagagaaggtactgtgccttcaacaactggggctctgtggaggagcagaggcagcagcaggcagagctcctggctgtgattgagaggctggggagggagcgagagggctccttccacagcaatgacctcttcttggatgcccagctgctccaaagaactggagctggggcctgccaggaagactacaggcagtaccaggccaaagtggaatggcaggtggagaagcacaagcaagagctgagggagaacgagagtaactgggcatacaaggcgctcctcagagtcaaacacttgatgcttttgcattatgagatttttgtttttctattgttgtgcagcatactttttttcattatttttctgttcatctttcattacatttaaatctctggaccctggagcacttctaatgtatcaccccatggagtcattgttctaataatcaccaattcagactcagatcctcgtggtctatggagcatgctgcttgctgtctgtgcagctcccatttccccttcttcctgatagacttggagctgtgtgcctccactccaaggctgcctgcctgctgtaaacactattccactctgtctgccaacaactgcttcaggaatgggcctgagatcccatgcaggtccctgagaagtgagtaaaagtccgcagaggtggggatggaagatctctccttagatagaacctgtcttcctccctggcattgtggggtctgggcgtgacactgggactctcagcagctttgtgctgccaacctgagattgaaggcagtgcctcagagcagcacagagagttggggccccctgagccctgagccaccagccctgcagcctgccctatctccgcatttccagttgtattagccaatagatttcctacttatttaagctatttgagctccgggtctcttctacctgcattctaaaacattcaaagtaataaaaatttctccacaaaaaaaaaaa

SEQ ID NO: 159 - DNA, 2963 bp, Homo sapiens
  misc_feature: Incyte ID No: 3029920CB1
ggccgaagaggctggcaggtggcgccgtggggtgggtgctcctggtgagaggagtccactccgtgcgtgcgggcggaggccggcccccgagagccgccgacatgaagaaagacgtgcggatcctgctggtgggagaacctagagttgggaagacatcactgattatgtctctggtcagtgaagaatttccagaagaggttcctccccgggcagaagaaatcaccattccagctgatgtcaccccagagagagttccaacacacattgtagattactcagaagcagaacagagtgatgaacaacttcatcaagaaatatctcaggctaatgtcatctgtatagtgtatgccgttaacaacaagcattctattgataaggtaacaagtcgatggattcctctcataaatgaaagaacagacaaagacagcaggctgcctttaatattggttgggaacaaatctgatctggtggaatatagtagtatggagaccatccttcctattatgaaccagtatacagaaatagaaacctgtgtggagtgttcagcgaaaaacctgaagaacatatcagagctcttttattacgcacagaaagctgttcttcatcctacagggcccctgtactgcccagaggagaaggagatgaaaccagcttgtataaaagcccttactcgtatatttaaaatatctgatcaagataatgatggtactctcaatgatgctgaactcaacttctttcagaggatttgtttcaacactccattagctcctcaagctctggaggatgtcaagaatgtagtcagaaaacatataagtgatggtgtggctgacagtgggttgaccctgaaaggttttctctttttacacacactttttatccagagagggagacacgaaactacttggactgtgcttcgacgatttggttatgatgatgacctggatttgacacctgaatatttgttccccctgctgaaaatacctcctgattgcactactgaattaaatcatcatgcatatttatttctccaaagcacctttgacaagcatgatttggatagagactgtgctttgtcacctgatgagcttaaagatttatttaaagttttcccttacataccttgggggccagatgtgaataacacagtttgtaccaatgaaagaggctggataacctaccagggattcctttcccagtggacgctcacgacttatttagatgtacagcggtgcctggaatatttgggctatctaggctattcaatattgactgagcaagagtctcaagcttcagctgttacagtgacaagagataaaaagatagacctgcagaaaaaacaaactcaaagaaatgtgttcagatgtaatgtaattggagtgaaaaactgtgggaaaagtggagttcttcaggctcttcttggaagaaacttaatgaggcagaagaaaattcgtgaagatcataaatcctactatgcgattaacactgtttatgtatatggacaagagaaatacttgttgttgcatgatatctcagaatcggaatttctaactgaagctgaaatcatttgtgatgttgtatgcctggtatatgatgtcagcaatcccaaatcctttgaatactgtgccaggatttttaagcaacactttatggacagcagaataccttgcttaatcgtagctgcaaagtcagacctgcatgaagttaaacaagaatacagtatttcacctactgatttctgcaggaaacacaaaatgcctccaccacaagccttcacttgcaatactgctgatgcccccagtaaggatatctttgttaaattgacaacaatggccatgtatccgcacgtgacacaagctgacctcaagagctccacgttttggcttcgagcaagttttggtgctactgtttttgcagttttgggctttgctatgtacaaagcattattgaaacagcgatgatataaaaagaaatactgtccctaccaaaaacaaatacttttatgtacattctgaatgctttaagttctgctagaattattgagatatttatacatgcagagttactttattaatatttgtaattcatgcataagagtattttaatgatagttataactgcagtattggctagcatatggaaagaaaacagctaacagccaaactaaaatggctaaattccagaggccaaaagggaatattttgtaaatatatgtacatattcaggcaagatatggtctcccaagctgagttctagaaatgatgtttctagacatttctaagtggtattgttagtgctcacttggctcactcttctaggtttaagttagcccagagattgtatttactcatggatcactttatttatttcacatttactcagaatgatcctttgggttctataaggacataaggtacaatttgccattgtctctccatttttaaaaacatacaagtcagtgtcagcttaccaacatgacattttttcagtcagttgtggtaggccagccttgaagccatcgcacagtctagaaacttgtgtagctgagtgtgcagctcacctttaagggtgaagttaggtaaaagcaattagcagaggcgttatctatgtgattatgttgcttccttgtcagtatgttgaattttatagccctttcaatgaaataaaaaaaaaatttgtatattaccaatgtttttagtttaaataaagagtcacccttactactgttgaatttcatcccaagtgtaaatcattctataatggctgtgtctgttatagtatattacagtaactgcatgtgtcaccaagtgttctatatcaggctaggataacctagaggcagtaattttttaaatgataaaataaatctaatgaatataaactctcatgataaacctattttttccatcatcagccttttcaagtatttaaataaataactgctgtgtactgtgaaaaaaaaaaaa

SEQ ID NO: 160 - DNA, 2481 bp, Homo sapiens
  misc_feature: Incyte ID No: 627722CB1
ctagcaagcaggtaaacgagctttgtacaaacacacacagaccaacacatccggggatggctgtgtgttgctagagcagaggctgattaaacactcagtgtgttggctctctgtgccactcctggaaaataatgaattgggtaaggaacagttaataagaaaatgtgccttgctaactgtgcacattacaacaaagagctggcagctcctgaaggaaaagggcttgtgccgctgccgttcaaacttgtcagtcaactcatgccagcagcctcagcgtctgcctccccagcacaccctcattacatgtgtctgtctggcctgatctgtgcatctgctcggagacgctcctgacaagtcgggaatttctctatttctccactggtgcaaagagcggatttctccctgcttctcttctgtcacccccgctcctctcccccaggaggctccttgatttatggtagctttggacttgcttccccgtctgactgtccttgacttctagaatggaagaagctgagctggtgaagggaagactccaggccatcacagataaaagaaaaatacaggaagaaatctcacagaagcgtctgaaaatagaggaagacaaactaaagcaccagcatttgaagaaaaaggccttgagggagaaatggcttctagatggaatcagcagcggaaaagaacaggaagagatgaagaagcaaaatcaacaagaccagcaccagatccaggttctagaacaaagtatcctcaggcttgagaaagagatccaagatcttgaaaaagctgaactgcaaatctcaacgaaggaagaggccattttaaagaaactaaagtcaattgagcggacaacagaagacattataagatctgtgaaagtggaaagagaagaaagagcagaagagtcaattgaggacatctatgctaatatccctgaccttccaaagtcctacataccttctaggttaaggaaggagataaatgaagaaaaagaagatgatgaacaaaataggaaagctttatatgccatggaaattaaagttgaaaaagacttgaagactggagaaagtacagttctgtcttcaatacctctgccatcagatgactttaaaggtacaggaataaaagtttatgatgatgggcaaaagtcagtgtatgcagtaagttctaatcacagtgcagcatacaatggcaccgatggcctggcaccagttgaagtagaggaacttctaagacaagcctcagagagaaactctaaatccccaacagagtatcatgagcctgtatatgccaatcccttttacaggcctacaaccccacagagagaaacggtgacccctggaccaaactttcaagaaaggataaagattaaaactaatggactgggtattggtgtaaatgaatccatacacaatatgggcaatggtctttcagaggaaaggggaaacaacttcaatcacatcagtcccattccgccagtgcctcatccccgatcagtgattcaacaagcagaagagaagcttcacaccccgcaaaaaaggctaatgactccttgggaagaatcgaatgtcatgcaggacaaagatgcaccctctccaaagccaaggctgagccccagagagacaatatttgggaaatctgaacaccagaattcttcacccacttgtcaggaggacgaggaagatgtcagatataatatcgttcattccctgcctccagacataaatgatacagaaccggtgacaatgattttcatggggtatcagcaggcagaagacagtgaagaagataagaagtttctgacaggatatgatgggatcatccatgctgagctggttgtgattgatgatgaggaggaggaggatgaaggagaagcagagaaaccgtcctaccaccccatagctccccatagtcaggtgtaccagccagccaaaccaacaccacttcctagaaaaagatcagaagctagtcctcatgaaaacacaaatcataaatccccccacaaaaattccatatctctgaaagagcaagaagaaagcttaggcagccctgtccaccattccccatttgatgctcagacaactggagatgggactgaggatccatccttaacagctttaaggatgagaatggcaaagctgggaaaaaaggtgatctaagagttgtaccacctatataaacatcctttgaagaagaaactaagaagcatttgcaaatttctcttctggatattttgtttattttttctgaagtccaaaaaattatcattacagtgtaccatattaagccatgtgaataagtagtagtcattatttgtgaaaaattcccaaaaagctggggaaaacaaatgtgtaacttttccagttacttgacacgattcagtgggggaaaaccagcattttttattctattgataccaaagcatttctaataagagcttgttaaatttaagaataaagttatttaaaataaaaaaaaaaa

SEQ ID NO: 161 - DNA, 1419 bp, Homo sapiens
  misc_feature: Incyte ID No: 1302117CB1
  unsure 10, 19, 27, 34, 36, 38, 58, 223, 225, 228, 246, 544-545, 1414-1418: a, t, c, g, or other
aagaacaggncgacgggcncaaggggnaaaaaanancnaaaaaaaaaaggacggcaantttccccccagggactggagaaaatttaaaaaaaggaaggttggaatccatcagtgttctatttagtcatcttctccttcatcctcctctccttcctccccgacatcatcatcttcatcttcttcaccttcatcctcatccccttcttcgtcaatatcttctaancnttnctcctcttcataattatnatcatcttcttctccttctccttcttcatcatccatatcgggaaccaagtagtactgtaatgggtttggccaaatatcatctttgatgacctctcctaactcatcagcacctgcatcagaatggtcagtaaaccaggtaaagaagctctctggttcctcatgctgcctcttcctgctggctttattctgcgtttgactcgaacgtttcgtcaaatcctttccagatttccatttgatttcgcggacgcgtgggactagttctagatcccgagcggccgctcgcgatctagaactagtnngacgcgtggggaccagcaccatggcggttggcaagaacaagcgccttacgaaaggcggcaaaaagggagccaagaagaaagtggttgatccattttctaagaaagattggtatgatgtgaaagcacctgctatgttcaatataagaaatattggaaagacgctcgtcaccaggacccaaggaaccaaaattgcatctgatggtctcaagggtcgtgtgtttgaagtgagtcttgctgatttgcagaatgatgaagttgcatttagaaaattcaagctgattactgaagatgttcagggtaaaaactgcctgactaacttccatggcatggatcttacccgtgacaaaatgtgttccatggtcaaaaaatggcagacaatgattgaagctcacgttgatgtcaagactaccgatggttacttgcttcgtctgttctgtgttggttttactaaaaaacgcaacaatcagatacggaagacctcttatgctcagcaccaacaggtccgccaaatccggaagaagatgatggaaatcatgacccgagaggtgcagacaaatgacttgaaagaagtggtcaataaattgattccagacagcattggaaaagacatagaaaaggcttgccaatctatttatcctctccatgatgtcttcgttagaaaagtaaaaatgctgaagaagcccaagtttgaattgggaaagctcatggagcttcatggtgaaggcagtagttctggaaaagccactggggacgagacaggtgctaaagttgaacgagctgatggatatgaaccaccagtccaagaatctgtttaaagttcagacttcaaatagtggcaaataaaaagtgctatttgtgaaaaaaaaaannnnna

SEQ ID NO: 162 - DNA, 1578 bp, Homo sapiens
  misc_feature: Incyte ID No: 3109992CB1
gctgccggatccttcagcgtctgcatctcggcgtcgccccgcgtaccgtcgcccggctctccgccgctctcccggggtttcggggcacttgggtcccacagtctggtcctgcttcaccttcccctgacctgagtagtcgccatggcacaggttctcagaggcactgtgactgacttccctggatttgatgagcgggctgatgcagaaactcttcggaaggctatgaaaggcttgggcacagatgaggagagcatcctgactctgttgacatcccgaagtaatgctcagcgccaggaaatctctgcagcttttaagactctgtttggcagggatcttctggatgacctgaaatcagaactaactggaaaatttgaaaaattaattgtggctctgatgaaaccctctcggctttatgatgcttatgaactgaaacatgccttgaagggagctggaacaaatgaaaaagtactgacagaaattattgcttcaaggacacctgaagaactgagagccatcaaacaagtttatgaagaagaatatggctcaagcctggaagatgacgtggtgggggacacttcagggtactaccagcggatgttggtggttctccttcaggctaacagagaccctgatgctggaattgatgaagctcaagttgaacaagatgctcaggctttatttcaggctggagaacttaaatgggggacagatgaagaaaagtttatcaccatctttggaacacgaagtgtgtctcatttgagaaaggtgtttgacaagtacatgactatatcaggatttcaaattgaggaaaccattgaccgcgagacttctggcaatttagagcaactactccttgctgttgtgaaatctattcgaagtatacctgcctaccttgcagagaccctctattatgctatgaagggagctgggacagatgatcataccctcatcagagtcatggtttccaggagtgagattgatctgtttaacatcaggaaggagtttaggaagaattttgccacctctctttattccatgattaagggagatacatctggggactataagaaagctcttctgctgctctgtggagaagatgactaacgtgtcacggggaagagctccctgctgtgtgcctgcaccaccccactgccttccttcagcacctttagctgcatttgtatgccagtgcttaacacattgccttattcatactagcatgctcatgaccaacacatacacgtcatagaagaaaatagtggtgcttctttctgatctctagtggagatctctttgactgctgtagtactaaagtgtacttaatgttactaagtttaatgcctggccattttccatttatatatattttttaagaggctagagtgcttttagcctttttttaaaaactccatttatattacatttgtaaccatgatactttaatcagaagcttagccttgaaattgtgaactcttggaaatgttattagtgaagttcgcaactaaactaaacctgtaaaattatgatgattgtattcaaaagattaatgaaaaataaacacttctgccttgacttcta

SEQ ID NO: 163 - DNA, 1505 bp, Homo sapiens
  misc_feature: Incyte ID No: 1138158.1
  unsure 1166, 1194: a, t, c, g, or other
aaatatatatattctttttttaaattaacagtgctaatgttattggtgtcttcactggatgtatttgactgctgtggacttgagttgggaggggaatgttcccactcagatcctgacagggaagaggaggagatgagagactctggcatgatcttttttttgtcccacttggtggggccagggtcctctcccctgcccaggaatgtgcaaggccagggcatgggggcaaatatgacccagttttgggaacaccgacaaacccagccctggcgctgagcctctctaccccaggtcagacggacagaaagacagatcacaggtacagggatgaggacaccggctctgaccaggagtttggggagcttcaggacattgctgtgctttggggattccctccacatgctgcacgcgcatctcgcccccaggggcactgcctggaagattcaggagcctgggcggccttcgcttactctcacctgcttctgagttgcccaggagaccactggcagatgtcccggcgaagagaagagacacattgttggaagaagcagcccatgacagctccccttcctgggactcgccctcatcctcttcctgctccccttcctggggtgcagcctaaaaggacctatgtcctcacaccattgaaaccactagttctgtccccccaggagacctggttgtgtgtgtgtgagtggttgaccttcctccatcccctggtccttcccttcccttcccgaggcacagagagacagggcaggatccacgtgcccattgtggaggcagagaaaagagaaagtgttttatatacggtacttatttaatatccctttttaattagaaattaaaacagttaatttaattaaagagtagggttttttttcagtattcttggttaatatttaatttcaactatttatgagatgtatcttttgctctctcttgctctcttatttgtaccggtttttgtatataaaattcatgtttccaatctctctctccctgatcggtgacagtcactagcttatcttgaacagatatttaattttgctaacactcagctctgccctccccgatcccctggctccccagcacacattcctttgaaataaggtttcaatatacatctacatactatatatatatttggcaacttgtatttgtgngtatatatatatatagatgtttatgtanatatgtgattctgataaaatagacattgctattctgttttttatatgtaaaaacaaaacaagaaaaaatagagaattctacatactaaatctctctccttttttaattttaatatttgttatcatttatttattggtgctactgtttatccgtaataattgtggggaaaagatattaacatcacgtctttgtctctagtgcagtttttcgagatattccgtagtacatatttatttttaaacaacgacaaagaaatacagatatatcttaaaaaaaaaaaagcatttggtattaaagaatttaattctgaa

SEQ ID NO: 164 - DNA, 1736 bp, Homo sapiens
  misc_feature: Incyte ID No: 3348156CB1
  unsure 1434, 1438-1439, 1512, 1514, 1521-1522, 1530: a, t, c, g, or other
cagccgcgcgcgctccccaggccctggcccgggcctcgggccggggaggaagagtagctcgccgaggcgccgatgagagcgggccgccccacagcccgagccggatagggagcgcgagccggcccggccccggtcgggcctctgaaaccatgaactttctgctgtcttgggtgcattggagccttgccttgctgctctacctccaccatgccaagtggtcccaggctgcacccatggcagaaggaggagggcagaatcatcacgaagtggtgaagttcatggatgtctatcagcgcagctactgccatccaatcgagaccctggtggacatcttccaggagtaccctgatgagatcgagtacatcttcaagccatcctgtgtgcccctgatgcgatgcgggggctgctgcaatgacgagggcctggagtgtgtgcccactgaggagtccaacatcaccatgcagattatgcggatcaaacctcaccaaggccagcacataggagagatgagcttcctacagcacaacaaatgtgaatgcagaccaaagaaagatagagcaagacaagaaaatccctgtgggccttgctcagagcggagaaagcatttgtttgtacaagatccgcagacgtgtaaatgttcctgcaaaaacacagactcgcgttgcaaggcgaggcagcttgagttaaacgaacgtacttgcagatgtgacaagccgaggcggtgagccgggcaggaggaaggagcctccctcagggtttcgggaaccagatctctcaccaggaaagactgatacagaacgatcgatacagaaaccacgctgccgccaccacaccatcaccatcgacagaacagtccttaatccagaaacctgaaatgaaggaagaggagactctgcgcagagcactttgggtccggagggcgagactccggcggaagcattcccgggcgggtgacccagcacggtccctcttggaattggattcgccattttatttttcttgctgctaaatcaccgagcccggaagattagagagttttatttctgggattcctgtagacacacccacccacatacatacatttatatatatatatattatatatatataaaaataaatatctctattttatatatataaaatatatatattggtgttttaaattaacagtgctaatgttattggtgtcttcactggatgtattgactgctgttgacttgagttgggaggggaatgttccactcagatcctgcagggaaaaggaagagatgagagactctggcatgatcttttttgtgtccacttggtgggccaagggtcttccccctgcccgaggatgtccagcccagggcatggggcagatatgcccagttttgggacacggcaacccagccgtccgtgacatgctaccatgtagcagctgaggggcaaaangtcnngatgagaacgggtctacagagttgtgagtcggcactcggcgttggaccgtcactctcaaggatttcccccgcncnctgtttnngcctggcntcgtcctacgcttgacccgacaagcatccgcaaagccaatttaaaccgtaacgtctggctcggattttggccgtcttggggcgtaaagggtcctcttcaacctgcccacatgttggccccacccccggaacgcccttgaaattttctcttaataagttggaaatgccttatgtaactcgggtacccccctagactggggcacatag

SEQ ID NO: 165 - DNA, 1212 bp, Homo sapiens
  misc_feature: Incyte ID No: 2133666CB1
ggcctccgcgtggcccagtgctcccagaagccctgtgaggacagctgtcggtcgggcttcacttacgttctgcatgaaggcgagtgctgtggaaggtgcctgccatctgcctgtgaggtggtgactggctcaccgcggggggactcccagtcttcctggaagagtgtcggctcccagtgggcctccccggagaacccctgcctcatcaatgagtgtgtccgagtgaaggaggaggtctttatacaacaaaggaacgtctcctgcccccagctggaggtccctgtctgcccctcgggctttcagctgagctgtaagacctcagcgtgctgcccaagctgtcgctgtgagcgcatggaggcctgcatgctcaatggcactgtcattgggcccgggaagactgtgatgatcgatgtgtgcacgacctgccgctgcatggtgcaggtgggggtcatctctggattcaagctggagtgcaggaagaccacctgcaacccctgccccctgggttacaaggaagaaaataacacaggtgaatgttgtgggagatgtttgcctacggcttgcaccattcagctaagaggaggacagatcatgacactgaagcgtgatgagacgctccaggatggctgtgatactcacttctgcaaggtcaatgagagaggagagtacttctgggagaagagggtcacaggctgcccaccctttgatgaacacaagtgtctggctgagggaggtaaaattatgaaaattccaggcacctgctgtgacacatgtgaggagcctgagtgcaacgacatcactgccaggctgcagtatgtcaaggtgggaagctgtaagtctgaagtagaggtggatatccactactgccagggcaaatgtgccagcaaagccatgtactccattgacatcaacgatgtgcaggaccagtgctcctgctgctctccgacacggacggagcccatgcaggtggccctgcactgcaccaatggctctgttgtgtaccatgaggttctcaatgccatggagtgcaaatgctcccccaggaagtgcagcaagtgaggctgctgcagctgcatgggtgcctgctgctgcctgcctgccttggcctgatggccaggccagagtgctgccagtcctctgcatgttctgctcttgtgcccttctgagcccacaataaaggctgagctcttatcttgcaaaaaaaaaaaaaaa

SEQ ID NO: 166 - DNA, 8846 bp, Homo sapiens
  misc_feature: Incyte ID No: 383376.19
gggtggttggtggatgtcacagcttgggctttatctcccccagcagtggggactccacagcccctgggctacataacagcaagacagtccggagctgtagcagacctgattgagcctttgcagcagctgagagcatggcctagggtgggcggcaccattgtccagcagctgagtttcccagggaccttggagatagccgcagccctcatttgcaggggaagatgattcctgccagatttgccggggtgctgcttgctctggccctcattttgccagggaccctttgtgcagaaggaactcgcggcaggtcatccacggcccgatgcagccttttcggaagtgacttcgttaacacctttgatgggagcatgtacagctttgcgggatactgcagttacctcctggcagggggctgccagaaacgctccttctcgattattggggacttccagaatggcaagagagtgagcctctccgtgtatcttggggaattttttgacatccatttgtttgtcaatggtaccgtgacacagggggaccaaagagtctccatgccctatgcctccaaagggctgtatctagaaactgaggctgggtactacaagctgtccggtgaggcctatggctttgtggccaggatcgatggcagcggcaactttcaagtcctgctgtcagacagatacttcaacaagacctgcgggctgtgtggcaactttaacatctttgctgaagatgactttatgacccaagaagggaccttgacctcggacccttatgactttgccaactcatgggctctgagcagtggagaacagtggtgtgaacgggcatctcctcccagcagctcatgcaacatctcctctggggaagtgcagaagggcctgtgggagcagtgccagcttctgaagagcacctcggtgtttgcctgctgccaccctctggtggaccccgagccttttgtggccctgtgtgagaagactttgtgtgagtgtgctggggggctggagtgcgcctgccctgcccttctggagtacgcccggacctgtgcccaggagggaatggtgctgtacggctggaccgaccacagcgcgtgcagcccagtgtgccctgctggtatggagtataggcagtgtgtgtccccttgcgccaggacctgccagagcctgcacatcaatgaaatgtgtcaggagcgatgcgtggatggctgcagctgccctgagggacagctcctggatgaaggcctctgcgtggagagcaccgagtgtccctgcgtgcattccggaaagcgctaccctcccggcacctccctctctcgagactgcaacacctgcatttgccgaaacagccagtggatctgcagcaatgaagaatgtccaggggagtgccttgtcacaggtcaatcacacttcaagagctttgacaacagatacttcaccttcagtgggatctgccagtacctgctggcccgggattgccaggaccactccttctccattgtcattgagactgtccagtgtgctgatgaccgcgacgctgtgtgcacccgctccgtcaccgtccggctgcctggcctgcacaacagccttgtgaaactgaagcatggggcaggagttgccatggatggccaggacgtccagctccccctcctgaaaggtgacctccgcatccagcgtacagtgacggcctccgtgcgcctcagctacggggaggacctgcagatggactgggatggccgcgggaggctgctggtgaagctgtcccccgtctatgccgggaagacctgcggcctgtgtgggaattacaatggcaaccagggcgacgacttccttaccccctctgggctggcggagccccgggtggaggacttcgggaacgcctggaagctgcacggggactgccaggacctgcagaagcagcacagcgatccctgcgccctcaacccgcgcatgaccaggttctccgaggaggcgtgcgcggtcctgacgtcccccacattcgaggcctgccatcgtgccgtcagcccgctgccctacctgcggaactgccgctacgacgtgtgctcctgctcggacggccgcgagtgcctgtgcggcgccctggccagctatgccgcggcctgcgcggggagaggcgtgcgcgtcgcgtggcgcgagccaggccgctgtgagctgaactgcccgaaaggccaggtgtacctgcagtgcgggaccccctgcaacctgacctgccgctctctctcttacccggatgaggaatgcaatgaggcctgcctggagggctgcttctgccccccagggctctacatggatgagaggggggactgcgtgcccaaggcccagtgcccctgttactatgacggtgagatcttccagccagaagacatcttctcagaccatcacaccatgtgctactgtgaggatggcttcatgcactgtaccatgagtggagtccccggaagcttgctgcctgacgctgtcctcagcagtcccctgtctcatcgcagcaaaaggagcctatcctgtcggccccccatggtcaagctggtgtgtcccgctgacaacctgcgggctgaagggctcgagtgtaccaaaacgtgccagaactatgacctggagtgcatgagcatgggctgtgtctctggctgcctctgccccccgggcatggtccggcatgagaacagatgtgtggccctggaaaggtgtccctgcttccatcagggcaaggagtatgcccctggagaaacagtgaagattggctgcaacacttgtgtctgtcgggaccggaagtggaactgcacagaccatgtgtgtgatgccacgtgctccacgatcggcatggcccactacctcaccttcgacgggctcaaatacctgttccccggggagtgccagtacgttctggtgcaggattactgcggcagtaaccctgggacctttcggatcctagtggggaataagggatgcagccacccctcagtgaaatgcaagaaacgggtcaccatcctggtggagggaggagagattgagctgtttgacggggaggtgaatgtgaagaggcccatgaaggatgagactcactttgaggtggtggagtctggccggtacatcattctgctgctgggcaaagccctctccgtggtctgggaccgccacctgagcatctccgtggtcctgaagcagacataccaggagaaagtgtgtggcctgtgtgggaattttgatggcatccagaacaatgacctcaccagcagcaacctccaagtggaggaagaccctgtggactttgggaactcctggaaagtgagctcgcagtgtgctgacaccagaaaagtgcctctggactcatcccctgccacctgccataacaacatcatgaagcagacgatggtggattcctcctgtagaatccttaccagtgacgtcttccaggactgcaacaagctggtggaccccgagccatatctggatgtctgcatttacgacacctgctcctgtgagtccattggggactgcgcctgcttctgcgacaccattgctgcctatgcccacgtgtgtgcccagcatggcaaggtggtgacctggaggacggccacattgtgcccccagagctgcgaggagaggaatctccgggagaacgggtatgagtgtgagtggcgctataacagctgtgcacctgcctgtcaagtcacgtgtcagcaccctgagccactggcctgccctgtgcagtgtgtggagggctgccatgcccactgccctccagggaaaatcctggatgagcttttgcagacctgcgttgaccctgaagactgtccagtgtgtgaggtggctggccggcgttttgcctcaggaaagaaagtcaccttgaatcccagtgaccctgagcactgccagatttgccactgtgatgttgtcaacctcacctgtgaagcctgccaggagccgggaggcctggtggtgcctcccacagatgccccggtgagccccaccactctgtatgtggaggacatctcggaaccgccgttgcacgatttctactgcagcaggctactggacctggtcttcctgctggatggctcctccaggctgtccgaggctgagtttgaagtgctgaaggcctttgtggtggacatgatggagcggctgcgcatctcccagaagtgggtccgcgtggccgtggtggagtaccacgacggctcccacgcctacatcgggctcaaggaccggaagcgaccatcagagctgcggcgcattgccagccaggtgaagtatgcgggcagccaggtggcctccaccagcgaggtcttgaaatacacactgttccaaatcttcagcaagatcgaccgccctgaagcctcccgcatcgccctgctcctgatggccagccaggagccccaacggatgtcccggaactttgtccgctacgtccagggcctgaagaagaagaaggtcattgtgatcccggtgggcattgggccccatgccaacctcaagcagatccgcctcatcgagaagcaggcccctgagaacaaggccttcgtgctgagcagtgtggatgagctggagcagcaaagggacgagatcgttagctacctctgtgaccttgcccctgaagcccctcctcctactctgcccccccacatggcacaagtcactgtgggcccggggctcttgggggtttcgaccctggggcccaagaggaactccatggttctggatgtggcgttcgtcctggaaggatcggacaaaattggtgaagccgacttcaacaggagcaaggagttcatggaggaggtgattcagcggatggatgtgggccaggacagcatccacgtcacggtgctgcagtactcctacatggtgaccgtggagtaccccttcagcgaggcacagtccaaaggggacatcctgcagcgggtgcgagagatccgctaccagggcggcaacaggaccaacactgggctggccctgcggtacctctctgaccacagcttcttggtcagccagggtgaccgggagcaggcgcccaacctggtctacatggtcaccggaaatcctgcctctgatgagatcaagaggctgcctggagacatccaggtggtgcccattggagtgggccctaatgccaacgtgcaggagctggagaggattggctggcccaatgcccctatcctcatccaggactttgagacgctcccccgagaggctcctgacctggtgctgcagaggtgctgctccggagaggggctgcagatccccaccctctcccctgcacctgactgcagccagcccctggacgtgatccttctcctggatggctcctccagtttcccagcttcttattttgatgaaatgaagagtttcgccaaggctttcatttcaaaagccaatatagggcctcgtctcactcaggtgtcagtgctgcagtatggaagcatcaccaccattgacgtgccatggaacgtggtcccggagaaagcccatttgctgagccttgtggacgtcatgcagcgggagggaggccccagccaaatcggggatgccttgggctttgctgtgcgatacttgacttcagaaatgcatggtgccaggccgggagcctcaaaggcggtggtcatcctggtcacggacgtctctgtggattcagtggatgcagcagctgatgccgccaggtccaacagagtgacagtgttccctattggaattggagatcgctacgatgcagcccagctacggatcttggcaggcccagcaggcgactccaacgtggtgaagctccagcgaatcgaagacctccctaccatggtcaccttgggcaattccttcctccacaaactgtgctctggatttgttaggatttgcatggatgaggatgggaatgagaagaggcccggggacgtctggaccttgccagaccagtgccacaccgtgacttgccagccagatggccagaccttgctgaagagtcatcgggtcaactgtgaccgggggctgaggccttcgtgccctaacagccagtcccctgttaaagtggaagagacctgtggctgccgctggacctgcccctgtgtgtgcacaggcagctccactcggcacatcgtgacctttgatgggcagaatttcaagctgactggcagctgttcttatgtcctatttcaaaacaaggagcaggacctggaggtgattctccataatggtgcctgcagccctggagcaaggcagggctgcatgaaatccatcgaggtgaagcacagtgccctctccgtcgagctgcacagtgacatggaggtgacggtgaatgggagactggtctctgttccttacgtgggtgggaacatggaagtcaacgtttatggtgccatcatgcatgaggtcagattcaatcaccttggtcacatcttcacattcactccacaaaacaatgagttccaactgcagctcagccccaagacttttgcttcaaagacgtatggtctgtgtgggatctgtgatgagaacggagccaatgacttcatgctgagggatggcacagtcaccacagactggaaaacacttgttcaggaatggactgtgcagcggccagggcagacgtgccagcccatcctggaggagcagtgtcttgtccccgacagctcccactgccaggtcctcctcttaccactgtttgctgaatgccacaaggtcctggctccagccacattctatgccatctgccagcaggacagttgccaccaggagcaagtgtgtgaggtgatcgcctcttatgcccacctctgtcggaccaacggggtctgcgttgactggaggacacctgatttctgtgctatgtcatgcccaccatctctggtctacaaccactgtgagcatggctgtccccggcactgtgatggcaacgtgagctcctgtggggaccatccctccgaaggctgtttctgccctccagataaagtcatgttggaaggcagctgtgtccctgaagaggcctgcactcagtgcattggtgaggatggagtccagcaccagttcctggaagcctgggtcccggaccaccagccctgtcagatctgcacatgcctcagcgggcggaaggtcaactgcacaacgcagccctgccccacggccaaagctcccacgtgtggcctgtgtgaagtagcccgcctccgccagaatgcagaccagtgctgccccgagtatgagtgtgtgtgtgacccagtgagctgtgacctgcccccagtgcctcactgtgaacgtggcctccagcccacactgaccaaccctggcgagtgcagacccaacttcacctgcgcctgcaggaaggaggagtgcaaaagagtgtccccaccctcctgccccccgcaccgtttgcccacccttcggaagacccagtgctgtgatgagtatgagtgtgcctgcaactgtgtcaactccacagtgagctgtccccttgggtacttggcctcaaccgccaccaatgactgtggctgtaccacaaccacctgccttcccgacaaggtgtgtgtccaccgaagcaccatctaccctgtgggccagttctgggaggagggctgcgatgtgtgcacctgcaccgacatggaggatgccgtgatgggcctccgcgtggcccagtgctcccagaagccctgtgaggacagctgtcggtcgggcttcacttacgttctgcatgaaggcgagtgctgtggaaggtgcctgccatctgcctgtgaggtggtgactggctcaccgcggggggactcccagtcttcctggaagagtgtcggctcccagtgggcctccccggagaacccctgcctcatcaatgagtgtgtccgagtgaaggaggaggtctttatacaacaaaggaacgtctcctgcccccagctggaggtccctgtctgcccctcgggctttcagctgagctgtaagacctcagcgtgctgcccaagctgtcgctgtgagcgcatggaggcctgcatgctcaatggcactgtcattgggcccgggaagactgtgatgatcgatgtgtgcacgacctgccgctgcatggtgcaggtgggggtcatctctggattcaagctggagtgcaggaagaccacctgcaacccctgccccctgggttacaaggaagaaaataacacaggtgaatgttgtgggagatgtttgcctacggcttgcaccattcagctaagaggaggacagatcatgacactgaagcgtgatgagacgctccaggatggctgtgatactcacttctgcaaggtcaatgagagaggagagtacttctgggagaagagggtcacaggctgcccaccctttgatgaacacaagtgtctggctgagggaggtaaaattatgaaaattccaggcacctgctgtgacacatgtgaggagcctgagtgcaacgacatcactgccaggctgcagtatgtcaaggtgggaagctgtaagtctgaagtagaggtggatatccactactgccagggcaaatgtgccagcaaagccatgtactccattgacatcaacgatgtgcaggaccagtgctcctgctgctctccgacacggacggagcccatgcaggtggccctgcactgcaccaatggctctgttgtgtaccatgaggttctcaatgccatggagtgcaaatgctcccccaggaagtgcagcaagtgaggctgctgcagctgcatgggtgcctgctgctgcctgcctgccttggcctgatggccaggccagagtgctgccagtcctctgcatgttctgctcttgtgcccttctgagcccacaataaaggctgagctcttattgtgggctcagaaggggacaagagcagaacatgcagagtgctgccagtcc

SEQ ID NO: 167 - DNA, 3759 bp, Homo sapiens
  misc_feature: Incyte ID No: 406362.7
  unsure 73: a, t, c, g, or other
gaaagccaagcgttttcctacaagaagccccagtagagcgagccaggcttcaacatgcgcgttctggagaganaacattgactccacaacagtggtcctttttgttttaaattaacatccccgactttttttatccttaccatttttataaaatgccgcgcgcttgcctcttggcaggcgtagggtttccctggggctgctgtggagaggccgcactggcgtggaaacagccgggctgtgcggctgccagaggcagcgtgtgcgcagcgcttcctgcagccacgtagcatcttctgccgcatcgcgcactcagctcgggcgggcgtcgggagtgagggcccgggggcgcagggtcagcggccggggcgacaccctccctggttgcccaaggaacagaaggggctgggccacgcggggggattcttgactccatgagggcagctgggtgtcctgcagggcagatgcagaggggcttggcagtcagagcaggctccccgtggcacgacctctgatctctgacccttcgagcccaacttccctcagggcaggaagcccatgaggacagtgagggaagcgctggaagggtccgtcccaactcagaaggccaccagggaggcggctgctcgcggggacggtgatggcctgcagcccctcgtaggacggggtcatctggccgcctgacgcagggcagtgggtgtcagaggaaaggcctggaggctggggtattcagccccggcagtcttggacagggcagcggcagctgttgattcacccccagcggccagccagcccagctgtctcacactgtgagcagcccacgtgggcagcatggcagaggcacaggcacagccatggcctggctctctgcgtttcctcgtgggagggggctttatgtggccgaagcaggccctggtgtggatggatctggcctcaccaggtattgagggagcacggggtgcagcctgcttcctccacgcacgtcgcccaatgggctccccaaggccctggcctcactccagatcccggggccacctccaggctccacgagcgccaactcccagcgccagtccagacccagaggcagccgtccctgcctagatggtgactaggcaccagctcagctgtcacgggtgctgccccaggtcccaggccccaccccctgctgcccaggcacacacccccgcggcaggtgacatccaccctgctcctgcgctctgctgtgccgggcacctgcctgctctacgcccctcatccccaggatttcccacccgcaggctttctgcgggagcagtggtggccccggcttctcacccttcaggttttcttgcatctgcgcaccggtggaagagtaggcccagtggactgggtgctgctgggaggtgggaggctgctgggagggcaccggatgccggggccttgcaacctggcagaggctgtgctgctcagggaagcaaggtggccctggggtgaggcggggggctcagaggaaggggagccctcaggaggaagtgttgggggcaactgccagagagcccggccactgcccagtgcccatccggaagctcagcagggagtgggcttggaagtgggcaggcggcatggtggccccgccagcatcctatggcgcagatgaagggccccctaatggagatcatcccagctcgccagcctcgactcggacccctgggtgctcatggtcgccgtacatcttgaagtcctttccggacaccaggctctgcttaacctggagctggaggagcagaatcccatacgttcaggatattttgggagaacttagagtaaaaggtgggtgagtgtgaagccttctcccatgttgccacctggagtgccagtacttgaacaaaaaacgccgctgacgacccttggcgggacccctcacttcccccggtgggagcattttctagttaaatgcggaaacccaagtagcgccacagctgcggggcggagctgctgcagaagtccacaggagaccgctcagaaagttgaagcggagcgctcggggtgcccttccacagccaagggccgggggctgctgcggaagatggacaccaccaccccactcaaaggcatcccgaagcaggcgcccttcagaagccccacgggcgcccagcgtcttcagcccacacagggaaccggacccccatcccgccttccaggacgctgctgcggaaggatacgaggtgtgaagctgctggacatttcttgagctgggatatggttggcgctggccgagaggcgaagggtaggaaggaagactctcgatgcggaggtggtggagaagccggccacaaggagggaaacggtggagtggagaatctccaccccggactacgcagccggcctggtgtccacgcagaaacttgggtccctgaacaatgagcctgcgctgccctccacgagctaccttccctccacgcccagcgtgtctctccgcctcctcctacattccccagcttccgagacatccccagccccatctttcccgggaagccagccgccccaccagaggagcccagcgccccgagccccacgttgccagcgcagttcaagcagcgggcgcccatgtacaacagcggcctgagccctgccacacccacgcctgcggcgcccacctcggcctcgtgacacccaccacacctccggctgtcgcccctaccactcgagacacccccggttgccatggtggccccgcaagacccaggcccctgctcagcagcagcctaagaagaacctgtccctcacgagagagcagatgttcgctgcccagtgagatgttcaagactggccaacaaagtcacgcggcccgagaaggccctcatcctgggcttcatggccggctcccgagagaacccgtgccaggagcaggtggacgtgatccagatcaaagctgagctgatacatcacggaggacctggccaagggcggacgggcagggttagcacaaaccattcttggtggaccccgtggttttggattgacttttgccagggcccatgggaggcgcttcaagaagtacaagcccattgaccaatgtgtccctagaaccacctaggctcacagcttggccgtcacttgttgggggtccacggcgacgattggctttggccaagctttaaagttaacccggatgtgcggacaccttggcccccgatggtccccgcggccgccgccctgcttgctgacccagcctgttttaagttctggatgcatttctctgacattatttggggcttatttttaaaattttaatactgggttctttttttgtgtgatttaagacatctttttggactcaacggttacatttttgaatgtagtaagtaaattaacctattaaagttacaacttcctaaattttagtgacagctctgacctgtttgttagactcttactttttaaaatcttttctattttccctcgctgggggcagtgcccctccatacccccagggttgagtgggaccaagtgtggcactggtggtactgtgggtgtgcggcagtggacaccctgaccacaccatgagctgtgggagactggtgggccttagtccccctgcctgtgcctgcctgggagttttgtattcatcttttgtatagttgtggacatttaagacagacagtctttgggtacctattttcattgtaaaactatctgaaccattaaagtcgagcttttctaaagaaagccacatagctgtgtttgggggcagcttgtcctccctgctcccgggacccagtc

SEQ ID NO: 168 - DNA, 3326 bp, Homo sapiens
  misc_feature: Incyte ID No: 1477209CB1
gcgagcgggggcgcgggtggcgcggcgggacgcgagcggcgagccggagcgcggagcccggctcccgcaccatggaggaggacgacagctacgttcccagtgacctgacagcagaggagcgtcaagaactggagaacatccgacggagaaaacaggagctgctggctgacattcagaggctgaaggatgagatagcagaagtagctaatgaaattgaaaacctgggatccacagaggaaaggaaaaacatgcagaggaacaaacaggtagccatgggcaggaaaaaatttaatatggaccctaaaaaggggatccagttcttaatagagaacgacctcctgaagaacacttgtgaagacattgcccagttcttatataaaggcgaagggctcaacaagacagccatcggcgactacctaggggagagagatgagtttaatatccaggttcttcatgcatttgtggagctgcatgagttcactgatcttaatctcgtccaggcactacggcagttcctgtggagcttccggctacccggagaggcccagaagatcgaccggatgatggaggcgtttgcccagcgatattgtcagtgcaataatggcgtgttccagtccacggatacttgttacgtcctctcctttgccatcatcatgttgaacaccagtctgcacaaccccaatgtcaaagataagcccactgtggagaggttcattgccatgaaccgaggcatcaatgatgggggagacctgccggaggagctcctccggaatctctatgagagcataaaaaatgaaccctttaaaatcccagaagacgacgggaatgacctcactcacactttcttcaatccagaccgagaaggctggctattgaaactcggaggtggcagggtaaagacttggaagagacgctggttcattctgactgacaactgcctttactactttgagtataccacggataaggagccccgtggaatcatccctttagagaatctgagtatccgggaagtggaggactccaaaaaaccaaactgctttgagctttatatccccgacaataaagaccaagttatcaaggcctgcaagaccgaggctgacgggcgggtggtggaggggaaccacactgtttaccggatctcagctccgacgcccgaggagaaggaggagtggattaagtgcattaaagcagccatcagcagggaccctttctacgaaatgctcgcagcacggaaaaagaaggtctcctccacgaagcgacactgagcgtgcagccaagggcgttggtctgcgggggccttggagctcctgctcttctcccgcacctccatggatgcactgctgccgagcagagcgtcctctgccaggccccgccctgggattcctagagactagcttcagcttttgctattttttttaagtgggagaagggtgggcggttatcactggggaagagaggaccggccacctgtccagcatgggctccagagccttcctctctcacagggcagagctcttgtcggcagggcagcctcctggccagtttctctgctcagtgttctggtagcagagctcagagccaactgtttacctcttggttgtccccgtgaagaagccttcaaaccctgcaccataaatacatgtgtccatatattattatatgttaagagaaaaaggtggaaaggaagagaagccacatactataaagatctattttttttttttttttttaagagagaacgtagggctgttcaggtgcattctgccctggctgcgctggggagcttctccctggagaagagcacctggggctgcggccaaggggcatcagcctgggcccgcggcagggcctggcctgcctctcctgtgctgtgggagctcgctgcctggtgcttgtctgggcgagatggacaggtgaggtcgaggacgcagagggcagaggcccagtggagcctcagacggcacagtcagagtcgggggcctgccctggccggggtcgcagtcggcagcagcgtgcagtccggcatctcccgcggatgcttttccatcccaagtgcctgcggagcgccgaggagaggagagagctgactggacgcttacgttattttcctccttcagaatccaagttcttgttgggctttaaagtagaaagtcagcattttccttgagctaaatacctaataaccaaaactgtgaggaaggttatcgggacagaggttccggataacctgtttcattttgggttttcttcctcttccccagactccagtcctcgttctagaggaaggagtaggacttccccgatccccgtagggcttcagctttttctgcctcaaaaccagccctaactggactactctggatgcattttgtggtgggccccctagaggggaagatgggcctttatctgctccgtggggtgcactggagtgaggggggtggccgggctgcctctcgcatctctgtcttcccctgcaggcgctgtgtgagctggccctgcccctcctcattacagtatgaagggagccgtgacacgcagcattttcctgccgttctctcagggactctcagggcagctcctgccactccgccagggccagcatgccagtccaggcagagcaggtggctggctgtctggccgtctcgccccgcccctccacaggaccctggaccagggcggtgcagggcgcggccccgaggaggcaggtggaggagctgcgggttttcacagggccgcgtcgccacggctcctctgatcctttagggttggcgagcatctctggaaatagcttttgcagaggagtggtgggaggaatagagggggacagtctgtcacctccctccccgccactttgtgtagatcctacctggagggaatggctttaggcacttttgtgccagagcttgtgagggtgacagaagagggtccaggctggaaacctgaactttctgggtgggagaaccaggtggtgcctgccgaggtctgggcgtgtttgggccggtgctggagcctgtccagctggcccgggccctggcctggttctcaagtgtttcctagacagagaggcacctgggtcagtattagtctatttatcagaggtgtaaataatctatgtatagtttttctccttttagattattttgtatttgtttaaaagaagttttgtcaaaatacaaaaatataaagaaatgactgaaagttgttgacagggtttttaagaaataattattctaattgtttttgtttgtttgtttttgccttgtaaactagcgccaaggaactgcagcaaataaactccaactctgcccaaaaaaaaaaaaaaa

SEQ ID NO: 169 - DNA, 2858 bp, Homo sapiens
  misc_feature: Incyte ID No: 233624.47
  unsure 1805, 1808, 1868, 1871: a, t, c, g, or other
gcgctgcgacacctcccagcccaccgaactccgccgccatttcctcgcttggcctaacggttcggccaatcccagcgcgcatcaagaaggactgaggctccgccaatcggaggccgccgatttcgacccttcgcctcggcccggcccaatccaggccccggccccgccgcccccggcccgcccccgcggtgccctctctcctccctctttgtgcgtctcgcgccgccgccgcccgccgcgtgagaggacgggctccgcgcgctccggcagcgcattcgggtcccctccccccgggaggcttgcgaaggagaagccgccgcagaggaaaagcaggtgccggtgcctgtccccgggggcgccatggcgaccggagcgaacgccacgccgttggacttcccaagtaagaagcggaagaggagccgctggaaccaagacacaatggaacagaagacagtgattccaggaatgcctacagttattccccctggacttactcgagaacaagaaagagcttatatagtgcaactgcagatagaagacctgactcgtaaactgcgcacaggagacctgggcatcccccctaaccctgaggacaggtccccttcccctgagcccatctacaatagcgaggggaagcggcttaacacccgagagttccgcacccgcaaaaagctggaagaggagcggcacaacctcatcacagagatggttgcactcaatccggatttcaagccacctgcagattacaaacctccagcaacacgtgtgagtgataaagtcatgattccacaagatgagtacccagaaatcaactttgtggggctgctcatcgggcccagagggaacaccctgaagaacatagagaaggagtgcaatgccaagattatgatccgggggaaagggtctgtgaaagaagggaaggttgggcgcaaagatggccagatgttgccaggagaagatgagccacttcatgccctggttactgccaatacaatggagaacgtcaaaaaggcagtggaacagataagaaacatcctgaagcagggtatcgagactccagaggaccagaatgatctacggaagatgcagcttcgggagttggctcgcttaaatgggacccttcgggaagacgataacaggatcttaagaccctggcagagctcagagacccgcagcattaccaacaccacagtgtgtaccaagtgtggaggggctggccacattgcttcagactgtaaattccaaaggcctggtgatcctcagtcagctcaggataaagcacggatggataaagaatatttgtccctcatggctgaactgggtgaagcacctgtcccagcatctgtgggctccacctctgggcctgccaccacacccctggccagcgcacctcgtcctgctgctcccgccaacaacccacctccaccgtctctcatgtctaccacccagagccgcccaccctggatgaattctggcccttcagagagtcggccctaccacggcatgcatggaggtggtcctggtgggcccggaggtggcccccacagcttcccacacccattacccagcctgacaggtgggcatggtggacatcccatgcagcacaaccccaatggacccccacccccttggatgcagccaccaccaccaccgatgaaccagggcccccaccctcctgggcaccatggccctcctccaatgggtaaatcagtacctgggaagtacgcctgtgggctctggggtctatcgcctgcatcaaggaaaaggtatgatgccgccaccacctatgggcatgatgccgacgncgncgccggctcccagtgggcagcccccaccccctccctctggtcctcttcccccatggcaanaanagcagcagcagcctccgccaccccctccgcccagcagcagtatggcttccagtacccccttgccatggcagcaaagatccctccccgcggcggcgatggcccgagccatgagagtgaggactttccgcgcccattggtgacccttccaggcagacagcctcagcaacgcccctggtggacaggatggttcggcaaagcagcctgagttatttttgtggacggaatcggaacacgctggctccatatcgtgaaatttttattaattttttctttttcctttgttacttctttatcttttcctttcttcagactccgtccaaggagatgctctccccggtcttctgctgcaatttagattcctttcccttctctccagttctccttcccttaccaaggagaggggagcaaatggttttgggcaagggctttggccattcatgtcaagctggttgtgggtttttcaaggtgccatagccacccccaaatatgtttgtttaaagcgtggggttttttaatctctgccacccttgtcaagggagtcttgtaaagttgccgagggtaggttcatctccaggtttcgggattcccatccgtcctggcgatcctgccagcagtgggtgggcagcctgagctccctcgggctcgcctgccagcctggagttcttcctgtgctccttgatcacctgagctgcctcagattccatttggtcctctccttcctggaaggcttccttttatgttttgttttaatcccaaatgtctgaatgttttgcagtgtgtaggggtttgagccccttgttcattctccttcctttttcctcccgcttccctctccatgaagtgattctgttgacaataatgtatactgcgcgttctcttcactggtttatctgcagaaatttctctgggcttttttcggtgttagattcaacactgcgctaaagcggggatgttccattgaataaaagagcagtgtggttaaaaaaa

SEQ ID NO: 170 - DNA, 870 bp, Homo sapiens
  misc_feature: Incyte ID No: 1398186.2
  unsure 788, 813, 828, 864: a, t, c, g, or other
gcgcagaggacggctagagcgttgctcgccgagagacttcctcttcgttaagtcggccttcccaacatggcgcagtctattaacatcacggagctgaatctgccgcagctagaaatgctcaagaaccagctggaccaggaagtggagttcttgtccacgtccattgctcagctcaaagtggtacagaccaagtatgtggaagccaaggactgtctgaacgtgctgaacaagagcaacgaggggaaagaattactcgtcccactgacgagttctatgtatgtccctgggaagctgcatgatgtggaacacgtgctcatcgatgtgggaactgggtactatgtagagaagacagctgaggatgccaaggacttcttcaagaggaagatagattttctaaccaagcagatggagaaaatccaaccagctcttcaggagaagcacgccatgaaacaggccgtcatggaaatgatgagtcagaagattcagcagctcacagccctgggggcagctcaggctactgctaaggcctgagagtttttgcagaaatggggcagagggacaccctttgggcgtggcttcctggtgatgggaagggtcttgtgttttaatgccacctggattatgcaaagaaaaatgaacccaaacatagacttgcaagacatggcctgtatgagaagaaaaagacctcaagaaagcaacgaaggaacgcaagaacagaatgaagaaagtcagggggactgcaaaggccaatgttggtgctggcaaaaagaagtgagctggagattggntcacagcccgaaggagttaaggttnctgcaattgatgttngctgtggccactgtggatttttcgcaagaacattantaaact

SEQ ID NO: 171 - DNA, 1370 bp, Homo sapiens
  misc_feature: Incyte ID No: 383884.11
gtgtggtcattggccctgccctctaggacagcgctaggccacctggtgtcaaagattgacccttggtcaacttgctgcgtagtcagaggccaccacacgccctgggaggagagaccgtgcctgtgttctgtgcctgtgggattgtggaagagacccaggagccctggcacaccccgtgtcccataacagagcctctgttccgtcctgcaggtggatgaagtgactgacctcctggccagcttcacctccctcagtctgcagatgcagagcatggagaagaggtagcaagagaggctccctgccttcctgccactgccccaccctgccccactgctgtctcagtaccaagaaaaagcccaacatctgggacttggagctgcacttgtctggtgaggaccttgccctcacccgcagatgccgtggggcagagatgctctctctccacggcctcagagccactcccagccacagtttccagcatctctgtggacagggaccacagctcccagcttcttccagttctcgcagcaccagaccagcctctgcagctgcacttcagctccgcagacctgcgctatctcagcagacctcacttgccccatggccttcatggcgcgctccaggcctcagacccttctctgtgttccgtcctggccatgggcttgttgcagtcagcaggtgtgggcttaggcgggcaccctgtggccaggggtactgcgtgaggccctcagttggtcctgtgcctctcaccagcacttagacagacacgtcaccagactttcaaggagatactgcagtgagtttctctggttggaaggggagggttggtgagtcccagaccttaaaaatacaaggttaagagggaccccaaagcaaaaaattccaacccttttcctcccagtcattgaaacaccaaaactattataccggagggtgtaatagttttgctgcccagttgtggtaggccagtagtggcctcccaagatgcccatgtcctaatcccaggaacctgtcaaaattaccttgtatggccaaaggggctttcagatgtaatgaagtaaggatctttcgccaggaagattatcccagcttgttcaggagggcttgatgtcctcacccgggtctgtataacagaagagcaggtgacgggagaggaggttggaggtgtagcgatggagcaggaaactggagttgaggagggcagctcaagccacagagtccaggccacctcagagccaggaaatgcatcctcccacagagccctggaaggccccagccctgctcccacctggactggctcagtgaggctaattttataattctggctgattttagaactctaagggaataaatttgtgttgttttaagtc

SEQ ID NO: 172 - DNA, 780 bp, Homo sapiens
  misc_feature: Incyte ID No: 023266.2
  unsure 739, 750, 755: a, t, c, g, or other
atttttgcttagtgtttctctatacagatccctgattcatctcccattatccaccagaactgaaagtctcctctgtggggctgtattaaatgtcgaggatgctgccactcggctccagcttttaaatcgctcagctttaagatctgtgcaggcacaggctaggatacctggttctcagagagagcaagggtcaacattatctccctggggagaagttttgacacctctagcaagctcttctgttactcacttaagtagtaaacaggaagaatatgttaaggttgccaaaacactttttactgatgaagcattaaaaccttgcccaaggtgccagtcccctgctaagtaccagccatataagaaaaggggactgtgtagccgaacagcctgtggttttgacttttgtgtgttatgtctgtgtgcttatcatgggtctgaagaatgtagtagaggagcagcaaagccaagaaatagaaaagatgctctcccaggaagtgcccagagtaagcggaatttaaaacgcctctgaagagactaaatatagaactcccccatgcagtgttctatttatctgacttaaaattatgaatattttgaatacatgcaaatcttcccattaatgacaggtgatgattaatttcctattttgtatatattataatcgatgtcattgtatgttttctttaaagttgttttgaaaaaattttattttactatgtcattttacccattttaatancttggtatttnaaatnaaggatttttcattggtgttaaaaa

SEQ ID NO: 173 - DNA, 485 bp, Homo sapiens
  misc_feature: Incyte ID No: 138709.3
tgaaaacttaacaatttaacttaggatgtaatcatcaagagttttatagctgttctgtatttagtaaagtggcatttctggccaatattaatacattttaatgtaagttagccaaaatttattagcaatacagtttttaaaagtttaacttttaagagttgcaagcttttttctaatcatgcttatctcttcaattagggttgaaaggaggagcaggaggtactgatggacaaggaggtaccttccggtacacctttcatggcgatcctcatgctacatttgctgcatttttcggagggtccaacccctttgaaattttctttggaagacgaatgggtggtggtagagattctgaagaaatggaaatagatggtgatccttttagtgcctttggtttcagcatgaatggatatccaagagacaggaattctgtggggccataccgtctcaaaacagatcctccagttattcatgaacttagagta

SEQ ID NO: 174 - DNA, 1672 bp, Homo sapiens
  misc_feature: Incyte ID No: 1073951.3
gcttcttcctctgatttttatcccattgaaagttctgacacttgaactttatccccagaccagttctgatccttaagctatccttcactccaagattaattctcacactgaaatatacatttgcgccccctgaaccttctactatctaattttgacccaaaatttagcttaactttagttattctgaccttgacctctgtctttatcccaattgtgtttttacctgggctttaaccctcacccaactcatccagctcaacttttagtcatatttcctcattcaactgcaactcttaccctggtcctaccttaatcccagcttggatccacctcataactataatcccattcttaaagtcccaacccaatcagaatatgtacccaaaacatctccaacctgaacccagcctttcaaatccagctgtgcctttaaacccgagggctttcttaaggtcctgccttccagaactctctggacctttccttcttgaccatgttctccctgctccagtgagctcagaagacccatgctcaaaaaagagtcaccaccctcagaggccatcttgaagcagcgaccgtctgacttgggggctgggctgggctgggattggggtgggtcacttggggtctcttttcctgcgtcggaactgacccctcatgtccttctcttggcagtgtcacccagctctggatgggcagcgtggcaagtgctggtgtgtggaccggaagacgggggtgaagcttccggggggcctggagccaaagggggagctggactgccaccagctggctgacagctttcgagagtgaggcctgccagcaggccagggactcagcgtcccctgctactcctgtgctctggaggctgcagagctgacccagagtggagtctgagtctgagtcctgtctctgcctgcggcccagaagtttccctcaaatgcgcgtgtgcacgtgtgcgtgtgcgtgcgtgtgtgtgtgtttgtgagcatgggtgtgcccttggggtaagccagagcctggggtgtctctttggtgttacacagcccaagaggactgagactggcacttagcccaagaggtctgagccctggtgtgtttccagatcgatcctggattcactcactcactcattccttcactcatccagccacctaaaaacatttactgaccatgtactacgtgccagctctagttttcagccttgggaggttttattctgacttcctctgattttggcatgtggagacactcctataaggagagttcaagcctgtgggagtagaaaaatctcattcccagagtcagaggagaagagacatgtaccttgaccatcgtccttcctctcaagctagccagagggtgggagcctaaggaagcgtggggtagcagatggagtaatggtcacgaggtccagacccactcccaaagctcagacttgccaggctccctttctcttcttccccaggtccttcctttaggtctggttgttgcaccatctgcttggttggctgacagctttcgagagtgaggcctgccagcaggccagggactcagcgtcccctgctactcctgtgctctggaggctgcagagctgacccagagtggagtctgagtctgagtcctgtctctgcctgcggcccagaagtttccctcaaatgcgcgtgtgcacgtg

SEQ ID NO: 175 - DNA, 2078 bp, Homo sapiens
  misc_feature: Incyte ID No: 482336.31
  unsure 2074: a, t, c, g, or other
cctaaggggccagagagagacatgacggaggatgaatggagcagcagggaagggaatggggagtgaaggggtgctagggccgagggcctgggtgctgggaggagaagaggagacaccagggccgcaggtatgagtaggaggcggagaggaggaggaaggggctttgcccctgctgctgacccgccttctccctgggttagcacccagtcttctttgtgggaagaagaattaacaccaaaagtctctgggaacacagaagctgatctgggcacagggagctccagccaagatgcctctctctgctttcgcctctcccataggcacagggcccccaaattctctacaacccataccctgggccttctgttgtcatagaagtcagagttgggggactcttagagtggtacctgatctggcttcctcccatgggaagaaaaggggactgaagctcagaaatggtcagtagtgtgcccaaggtcacacagcacgcagagacatcctcttctgaaagcttaatctcagtctgagctgctgtaaccaggcttagatccgggtactctgagaggatatggttcccccaaccctggggggatatggaggtagataccttgcttttatctcttaacttatcagagttgtggtccagaaactcattcaaactgggaggcctactttaagaatacaaagttaccaaaaaaaccccacttacttagaatgagaaaagtcacacagatcactagagccttggacattcaggcctcttctgtctgagttccttaggcatcgtaccagaaattcttcgagttgctgcctgactgcaacctggctccctctccccacccacaagtgccagcaactcccagcaccagcaggggccatttaagcaagccccctggaagctttcagcaaacctctctctttccctcagcctttgctctgcctgcttcctgggcttggggccgcagaggccagcgaggctcccttcattccctccaccaaagtgaggtcttccctgcccccacagagcaaactgatccccaaggccaaggccttggtgacaatgggactgtgagtcacaaaacaaacatagccagctgtcccgaatggatttttaatttctactgcaagacctgtttcagccccactggctgcttaaagccacccccactccctgctccttccttagtcctggctggagccccattcaatcagtcaacgattcacgaattattttgacatatattaagcaatgacttctccaggcctcatactggggataaaagtatcaataggccacagacacctttaggattttatgatacggtgaggaaaggcagccatctacataaataacacatacagctaccatcaccgaatcccaggtgctcagggctttagacagattatgtcatttaaacctcacaggcccatgaatttggtcctgtagttgggcccaagacataggtgggaaatggaggccctgagacattgcctggggtcaggtggccagtggatagaagggccaaggtgaacactcccttcctgcatgcctcctcgctccttttacaaggctgaaggcaggctggaagtgtggggcaagaaggaaaaatcaatgatcctgcttggggcctggaaggagagagggctgagagcgcttccctcccacgctaggaaagagccgtcctcactgtctgtcctctgcccccaggttggctggagatggagtgggagccgtgaatatctctgtgatgaattccactggtggcagtagcagtggcggtggcattgggctgaccctcgggggaaccatgggcagcaatgccctgagcttctccagcagtgcgggtcctgggctcctgaaggcttattccatccggaccgcatccgccagtcgcaggagtgcccgcgactgagccgcctcccaccactccactcctccagccaccacccacaatcacaagaagattcccacccctgcctcccatgcctggtcccaagacagtgagacagtctggaaagtgatgtcagaatagttccaataaagcagcctcattctgaggcctgagtgatccanaaaa

SEQ ID NO: 176 - DNA, 472 bp, Homo sapiens
  misc_feature: Incyte ID No: 482336.36
cactgattggctgtgtgatccctgggtggtgctttctcttctccaagactcactctcctcacctgtgaaatgggtgttctgggtgttgaatgggtgcgaatctcaaactctcagtgattctccagcagaagggcatggtgggagtggaagagccctggggtccatggggatgggactgcggaccttgtctgtcctccctgcctggcttggaggagaatgaatcccttcctcacactgctgtctggtctcctggcatcgggcaaaggttgatgggagtcagactgtccttccctgaaaatataagttgggaggggccttgggtggggagagggatgagttacctgtactcactgcccatctctctgccataactctctgtatggcccctccagtttgagaccctccaggcccaggctgggaagcatggggacgacctccggaatacccggaatgagatttcagagatgaaccg

SEQ ID NO: 177 - DNA, 1278 bp, Homo sapiens
  misc_feature: Incyte ID No: 1094984.1
gtggctgcagaactccaacgttaaatacacagacgtggtttttattctcctgagttttcactctcatgaagagtgaacctggtgggacttgaagccaaaaagtcacctaactcttccaaacgctggctcttgcagaagttggagtaaacaggtcaccagcccctagcaccttccacccgccacctgcctgaaatatgtcccctggttggtagaagggcagggcgagagtccctgtacttaccttgttgacagactaccttttttgcaaccagctgatgaatgcagtgaacacactggacagggatgtcctcaaccagctacacgtacagctcatggagctgaggagctgcaagggttacaagcagtgtaacccccggactcgaaacatggacctgggacttaaagatggaggaagctatgagcaatacaggtatttcgttttattattaaagcctaaacaaagttctcctatcttggcccatccttcagtctcatctctgtgagtctgcacctgttatcttgagaaactgcccttccctctggtctgcccgagaccaggatcacccaccaaagataggtgtcacctaggagaccttgtttgtatagttctttggggactttttctttcttggtgatggttaacattcattctcctttgacacttgaaaacttaggcagtttcagcgtcgaaagtggccagaaatgaagagaccttcttccaaatcactgtgagttgaggaaccagcttacaaatagaaatctggttctgaccgcttcattttgccaatgctattctatttgcatgccatttcttacataccaccctttgtttgttctcatgatgagggtgggggggaagtactaatgcacatctttccctaagaaaacacttgaatccatttcatgttttagattaatgccttgtccagtacactgctgttctcgctataatctgtgcttggtaaacttgagctattacttagaggttgagaagcatttaaatattacaaattgctaggcatcttgaaggctgtggctacaaaagtgctaactgatatacaacatcagtagtaggatggcctcattaaatggtttccaaaaagcccatgctacaaactctcactccagtgccattggaggctgacagggactaagagactggcaacctgtaaagttcacctctattctaaagggagcaggccagtttgctccctgcaggaatgggctgaggttcgccagattttctcatcgtctaccaaatccaaaatgcaagtatgt

SEQ ID NO: 178 - DNA, 4446 bp, Homo sapiens
  misc_feature: Incyte ID No: 001322.4
gcgagttgccaggcgagacaggaacttctttccccttctctgtgtcaggatcgcagaaagtatgtcccttctctcaccatgagctggctctccagttcccagggagtggtactaacagcctaccaccccagcggcaaggaccaggccgtcgggaacagccatgcaaaggcaggggaggaagccacctcgagtcgcagatatggccagtacactatgaaccaggaaagcaccaccatcaaagttatggagaagcctccatttgatcgatcaatttcccaggattctttggatgaactatctatggaagactattggatagaactagaaaacatcaagaaatctagtgaaaacagccaagaagatcaagaggtggttgttgtcaaagagcctgatgagggagaattggaagaagagtggcttaaagaggccggtttatccaatctcttcggagagtctgctggagatccacaggaaagcattgtgtttttatcaacattgacgcggacccaggcagcagcagttcagaagcgagtagagacggtctcccagaccttgaggaaaaaaaacaaacagtaccagattcctgacgtcagagacatatttgctcaacagagagaatcaaaagaaacagctccaggtggcactgaatcgcagtcacttagaacaaatgaaaacaaataccaaggaagagatgacgaggcatctaaccttgttggtgaagagaagctgatcccacctgaggagacgcctgcccctgaaacagacatcaacctggaggtatcatttgccgagcaagcactcaatcagaaagagagctccaaggagaaaatccagaagagcaaaggcgatgatgccacattacctagtttcagattgccaaaagacaaaacgggtaccacaaggattggtgacctcgcaccccaggacatgaagaaagtttgccatttagccctaattgagctgactgccctctatgatgtattgggtattgagctgaaacaacaaaaagctgtgaaaatcaaaacaaaagattctggtcttttttgcgttccattgacagcgctattagaacaagatcagaggaaagtaccaggaatgcgaatacccttgatctttcaaaaactgatttctcgaattgaagagagaggtttggaaacagaaggcctcttacggatccctggagctgccattagaatcaagaatctttgccaagaactagaagcaaagttttatgaagggacttttaattgggaaagtgtcaaacagcatgatgccgccagcctgctgaagctcttcattcgggagttgccccagccactgctcagtgtggagtatctcaaagcctttcaggctgtccagaatcttccaaccaagaagcagcaactacaggctttgaaccttcttgtcatcctcctacctgatgcaaacagggacacactgaaggcccttcttgaatttctccaaagagtaatagataataaagaaaaaaataaaatgacagtcatgaatgtagcaatggtcatggccccgaatctctttatgtgtcatgcattgggattgaagtccagtgaacagcgagaatttgtaatggcagctgggacagcaaataccatgcacttattgattaagtaccaaaaacttctgtggacaattcccaagtttattgtaaaccaagtgaggaagcaaaacacggaaaatcataaaaaggataaaagagccatgaagaaattgctgaagaaaatggcttatgaccgagaaaaatatgaaaagcaagataagagtacaaatgatgctgacgttcctcagggagtgattcgagtgcaagctccccatctttcgaaagtttccatggcaatacagctaactgaagaactaaaagccagtgatgtacttgccaggtttctcagccaagaaagtggggttgcccagactctcaagaaaggagaagtttttttgtatgaaattggaggaaatattggggaacgctgccttgatgatgacacttacatgaaggatttatatcagcttaacccaaatgctgagtgggttataaagtcaaagccattgtagaagacttaacaagctgcagataaccatgtggacttctgtcataattcttgctgagtcaagagtgtaaataaaagaaatggcaggactcatattattcagttgtacccaagtatttaaaaatgactctcttaagccttaaaaagtcatagatttgtgctgctgccagaattatattaattattattaatgttattattagaaaaaaaatttctggagtgagagtaaagaggcttaattagtttgtgggcagttttcatatgctctgtgaaatgtgtccagatgtgacatagtttttttttttaatatgtggaaatgtcttctcttcccattcttttctcctaaaatcatatatactgtaatatatgctctctcacctctattacctcctcacatctaccctttcccagttaggtttgctttttgaccaaaaagataacaaataccaggtatggcaagttgtgaagacagcacattaaaacatacctaatttcacagtattcctgtcacgacagaatgttagtattcatctctttgaatcatttgctcaaataataacattccaccttttcctgctgtatcacaggaagtgatttgcattttttttcagttcatctgacttatgttcacagaaccgtatcagcgaccaagaaaataggactgtcagaagctgccagttattactgaaccattaaatacttatatactaagaataaataaaatatacccatgtgaaataataattggattatggataacaagagagtgaaagccaaagcactttctgtctactgtactcttctaaatggaattttaaaagtcatagctggctttacgtgttgtcattattagcattataaatatgcatgatagtataatccagtaatggttgaagaatgtattttacttaaagagggatttttttttttaagtcctgaataagtctactggaagaattattcttctgggtgaaaaagcttttgtttgtgttcttattttaaataatcggagtcaatttattaaaatgttcttgaaagtactattcccagggattttaatgcacaaaccatattgtgacaagagatgagcctctgtactgtaaataagaaatgaagtagagaaatgttaaatattttatgagtttagaatatagtaaataaaaggtgatgtaaatgaatgctgcacaaacggtgttcatgatacttttagtagtactttaggaaaaactacacattctcagaagctcttgatgtctctaatgaagggggggaatgctgttaatgagaacagtcataaatttttagcatataattacaagaacagcctgtggatatgatcacttaaatgattttgtggtgattcgtgccattgcttttttatttaaaagaaaattttgtaattaaatgcctttttctaaattatcttctcttggaatcattacttttaatcctatgtgtttatgagtatttttgcttttttttattaatattgagaaatggacttttttgttattaaaagtcacctctattttctattttctttgtaatttttaaagtaggaagatgtcagagatgtaaatatgttttcgtctttagtttttttccttttacaaatttttattcttcaggattttcaaaatacagtttagtctgtttctttgacaatatgtattaatttcccaattagcaaaatggtacttattagtgggttgaaaacaattaataatataaaagaaaaattaagtgcttaaaacattttaggagtatacaacttcaaaaaaaaagatagcagtgaggataatgatttaagtaaaaggttgtctgaagcatatgccaactaaatttcgcaacgtttgctacctacctgaaaaggagggtcaggagggagacacaacatatttttgatcatgaaaaagtatcttaattttaaaaaagtgaaaatgccattttattttgaatcccttttagaactcacgacccaagttcatcaatgttgaataatatcacgtttaaataacaaaaaaatatggactttaaaaaatctcaaattttttagagacagggtcttgctctgttttccagattggagtacagcagtgcattcgcggctaactgcagcctcaagcactggggctcaagcaaacctcctgcctcagcctcgtgagtagctaggaccacaggtgcatgccaccatgcctggctctaaagagaaaaaaaacttgataccatagagccttgaatataaatatcctgatgttaacctactgcttttgctgtgattttttttccttagtgagttttaaatctcaggctagatttttatttgtttttctgtgtgtgtatgagacaaaataaaaataaatatatttgccttgagttt

SEQ ID NO: 179 - DNA, 1060 bp, Homo sapiens
  misc_feature: Incyte ID No: 482336.38
cgctcctcctcgcccgccgctaggtccatcccggcccagccaccatgtccatccacttcagctccccggtattcacctcgcgctcagccgcctggaggcggagctgcggacatgcaggatgtggtggaggacttcaagaataagtacgaagatgaaattaaccgccgcacagctgctgagaatgagtttgtggtgctgaagaaggatgtggatgctgcctacatgagcaaggtggagctggaggccaaggtggatgccctgaatgatgagatcaacttcctcaggaccctcaatgagacggagttgacagagctgcagtcccagatctccgacacatctgtggtgctgtccatggacaacagtcgctccctggacctggacggcatcatcgctgaggtcaaggcacagtatgaggagatggccaaatgcagccgggctgaggctgaagcatggggacgacctccggaatacccggaatgagatttcagagatgaaccgggccatccagaggctgcaggctgagatcgacaacatcaagaaccaggatgggcaggccaggtataggctagtactggtgtagcccctagcttactagctgcactgctgcccacagcgtgccaagttggaggccgccattgccgaggctgaggagcgtggggagctggcgctcaaggatgctcgtgccaagcaggaggagctggaagccgccctgcagcgggccaagcaggatatggcacggcagctgcgtgagtaccaggaactcatgagcgtgaagctggccctggacatcgagatcgccacctaccgcaagctgctggagggcgaggagagccgagtctgcaaactacggccacatgcaggcttcctgtttgtcaatcaagttttcttggaacccagtcataccgcttccttcaagtattgcctttggctgtggctgctttacatgacaacggagtggagcagttgaggcagagactacatggcccacgagcctaaagtttttactatctgaagctctaagaaaaagcttgcctgccctagaaccccaagctgttatttc

SEQ ID NO: 180 - DNA, 2391 bp, Homo sapiens
  misc_feature: Incyte ID No: 245093.30
tgctgggtactttctgaggtgttgggagtaaataggaaaacaattttgagaaaatctcttcttttatagagcttaactataaaggatgtttccaaaatttcagtttggcttttctaaagaaatattgatttagatattttattaacgcatttttggttcttaaattccttaggcgtcctttcttttgaagttaccgcaccttaaaaacctggctttatgttttgtgctcaatatccctggccttatatatcaaatattatggcatgaaatacttatggtttcaaaaaactttacttttattttcattattttggattgttctaggctggtttcattttggtaatcatgtacattgacaatttctgaacaagcaaaaaaaaatgctctcaaagataagcaagcaacagttgcattccactattgaaggctattacagtatgagttaaatgtactgaacttatttttcttactcctctgtgaaacagtcttaattaactaatgtagtaagcagctttctaaccttcaaaatgattttctgtggtagcaaaatcattttgcaagtcaaatgcaacactagtttatcttttgcatttgaaggactgtttaactattaactggttaattgtgtatcattcccatacagaaggtaagtactcaaattattttcctcataaaacctgacattcagcatcttaaaggtaggtatacatttggtactttcttatgttcactcctatacccactagatcaaaaatataaggtactgagtgattttaaaacttaaatgaaaaattttaataaggaaaaagtaatagacaatatcagtatgataaagtgggatctacaccagttatcagagaaacacaaatgtgtacatactgcatgatctgcaaagtgtagccacatataatattttgcataatcatactttataactacgaataaacagatggatttatccatctgtttaaaagctaaagcagatgaaagtaattttagtagcacacaaacagactaaatcatttgttctcataactcttgtctaatttgaagacaatgggaaatatttaaaagtgatttcatagagcctgaaaccactttgacatttgagttgagtcacaccgaatgttgaaataaatgtcctattccggtaaatttaaaggactgttttaacatgataatttgtctcctaaaataatgtcccaggacccacactaacaaaagtcaaaattgaaggtgaacctgaattcagactgattaaagaaggtgaaacaataactgaagtgatccatggaggtgcgttccttatgttacctggggccgactaccttcgctgtgattattttgaaatagtgttggtttagaaatattgaacatctgatattttctcttagttcttattttataaaaattgtgggaattatttcctcagctatgagttcttattagctggtcagaaataaaacatagttagcttttaatggatctagttggaattaatttatctattaagtcactgggcccaacaaaatgtcatgatttttgcatatacaagtgaggattgtggaataaaattgtaacattaatgtcagtataaaaggaaatattagaaacagtaggaaaaaatgaccattgtataagtctctgtctaataagccactccactactaggatttatgatagggctcccattccaatgatatagaactccctggattctcactaagtatttattccacatccagaaaacaagtatggcatggagagttaggatgtcaaatggccctctctctcaaccaagattcaggacatagctattaccttttagatccctattgatatgatttttgggggatatgttctaaaaatgtttatgattgaatcttaaatggtaatatttgtagaaatatagttaatcattacaatgtctagcttatggatgtatagtcacaatatgagggtaaatcaaatgcatttgtattcccctgcttttagagccaattattaaaaaatacaccaaaatcattgatggagtgcctgtggaaataactgaaaaagagacacgagaagaacgaatcattacaggtcctgaaataaaatacactaggatttctactggaggtggagaaacagaagaaactctgaagaaattgttacaagaagacacacccgtgaggaagttgcaagccaacaaaaaagttcaaggatctagaagacgattaagggaaggtcgttctcagtgaaaatccaaaaaccagaaaaaaatgtttatacaaccctaagtcaataacctgaccttagaaaattgtgagagccaagttgacttcaggaactgaaacatcagcacaaagaagcaatcatcaaataattctgaacacaaatctaatattt

SEQ ID NO: 181 - DNA, 2145 bp, Homo sapiens
  misc_feature: Incyte ID No: 1400296.1
  unsure 343, 350, 355-356, 359, 362, 373, 381, 388, 393, 409, 413, 431: a, t, c, g, or other
ggggcaggccactgccctcttgggggcctcagtttccttacctgcaggaggggaggattagaagggggttcgtgaggctttgctgtgctccatgcctggcacacagtgagcacttactgagtgacagtgacagtcgtgacaccaggaaagctgttccatattctcccatgcctcgtcccaccccacgctgggcatggatcctcaatggctgccttctgagcagtccccacgatgcccacaggcatcagctgacctgtccccccaaataacaaatgcctaaactttcctataatgtaacggagacagggcagactgtgcccatctcctctcctcaccagctgtntacctgngcganncanttnacctccttgancctcagtntcctcanctgtnagatgggtagaaagcnagantctgcagtcagggtgctntggcgggtaagtgagctctatgagtggtatccacgtccaggattcttgtgactgccgttgtgcccttttccagggctgcacgttttgccctgggtccacctgcagtggcacacttcaggcctctaagcccccagtggggcacatttcctaggcagcaagaagcctgagcatgcccccaggaccagcccatcccccaagccctttgtcccctgcctctgcccaggccttgtctctgaaggagtctgagaagatggcgctgtcagagaagttgatgggtacacggcacagcctggccaccatctccctggagatggagcggcagaaaccagatgcccagagccggcaggagcaggaccgggtaggcctgccgtccgtagggaggcttgcggagcaggagcgccctctctccaccgagctatcccgcggtttccagcatcccatcttcgcggactcctccttggctctctcttctcctactctgggtcttctattcctgggtgttccttgaattgcctattctttccttttgttgcctcggaacctctcacgcgctgccacaagttactctttgtccttgggtagttctgagactttaaagaagggtaatgccctgtaaggaatgcacataaatgcgtccaatgaatttgtcatctgttatatattgttcactcagtaactatcatcgtgaattcattcatgtacttgttcatgtcttttataaaacagcgtcgcactttcttcagttgtgccaatatattagctcacaatacagtttgacacagttttaataacttacttgaatatataaatctcgttctggctattttgtaccgacatgaaaaataatgcctgcagagagcattgtttgcacaatgtatccgtggcaagatgttaggcacagaggctcttcttttatcccatccctatggccaacctatggaatgtatacacgtttaatgagattttgccagcaatcaaagccttcagggaaaatgtccctagctctttactaccatcagatcaaggactctggataattgggcataacatcctggaatagctgaaacagagatattattctctgctctcctctgttgtctttgtcttttcacgtcttaataaaagtgctggtgacaagagtgtaactatgtcagtgttctcctgctgtccttgcctgtgtgggtcttctcccaaacccgactttcctccagcggcttcactgaaaaagaggagggggctgtggggggtgggtcggggagcagaggaggaaataaactgaatagggaggaagcttctcacaggcccggagagggtaaggaagggagtcaaagacagaattttcttcagcaaacagtaaaaggggaaatctggggatgctaagagtttttaaaccctttgctccatcatataagtaatccatgattttctgttccacaaatcaggactcctactcctccctccctcgccatcgccaatcctgattcctgtttacaaagaatgttgacaaacaaggaattatgtataacagttcccagtttgctcaggaaattctcagattataaagagacattacaaatgaacaagtgaagagaagaaccttggtggttccaacatagtatggccattgttttatactcaaaatatagaaagacaacctcagaataataaaacttttggaatggaataaatcaagtttatcattaaaatgcaaaga

SEQ ID NO: 182 - DNA, 683 bp, Homo sapiens
  misc_feature: Incyte ID No: 1330212.13
ggctcggaggaggccaaggtgcaacttccttcggtcgtcccgaatccgggttcatccgacaccagccgcctccaccatgccgccgaagttcgaccccaacgagatcaaagtcggtgcgtgctctggttgtggccggggctgcgggatggagcatccctcggccctgccgcgcgtgcaaagctttccccgtatggggctcttaaagccgctgcctcccagagaccttcccggtgttgcgccgccccggccaagcctcagcctttctgggccttagcttcttcacgtgtaggtggggagggaggactggaccacctgtggcggcttgggagcccgcacgccctaggtatacctgaggtgcactggaggtgaagtcgctgccacttctgcgctggcccccaagatcggccccctgggtctgtctccaaaaaaggttggtgataacattgccaaggcaacgggttaccggaagggccttgatcatacacgtaaaggaatgcaatggcagatgaccaaatgtcatgtggtttcctgggatggattttgtaaacacaggcaggcacctgcaaacatctgatcacctctgcgaggaggaggatgaaggtgggggaatgaaggcatgcaggtgaatcaggtcagtgttgctcataggctgacccagtgcggatggtcccgtcagtggcaag

SEQ ID NO: 183 - DNA, 1292 bp, Homo sapiens
  misc_feature: Incyte ID No: 235959.4
aaaaaaaataaaaactgtaacaaaaaaaaagaaagcaatatgaaagtatgttattatttctctttgtaggcatagacttttactttaatgaagcataaaaaaaaaaaaatcatagactgggcatgagccatcacgcccagcctgtattacatttggatttgatagtaaacagagtttgtgaacccagaggtttttaattgctgggacaaagggtattcgtatcactgtttacaacattcaaccacgaagttctgttttcttaaacttaactaaaaggtagagaattagacttccctgggcaggtatgatatataaagtacatatttatgtcattagtggaacccagcttgagataaattaatggagcttccataaattttctttattctcattaggagccagcttttggcaaaaaaaaaaaaaaaaaaaggcctatttcttctgtgttactcatacttacatgctacccagaagtctctggcctagccaggagattttaaacaattgaaataattcatgttttcgttttagggttcacctttagatgttcttaaagatgaaagggttcagtactggattgagaattatagaaatttattagatgcctggaggttttggcataaacgagctgaatttgatattcacaggagtaagttggatcccagttccaagcctttagcacaagtttttgtgagttgcaatttctgtggcaagtcaatctcctacagctgttcagctgtgcctcatcagggcagaggttttagtcagtatggtgtgagtggctcaccaacgaaatctaaagtcacaagttgtcctggctgtcgaaaaccacttcctcgatgtgcgctttgtctcattaatatgggaacaccagtttctagctgtcctggaggaaccaaatcagatgaaaaagtggacttgagcaaggacaaaaaattagcccaatttaacaactggtttacatggtgtcataattgcaggcacggtggacatgctggacatatgcttagttggttcagggaccatgcagagtgccctgtgtctgcatgcacgtgtaaatgtatgcagttggatacaacagggaatctggtacctgcagagactgtccagccataaaatgttaccaccttaagagaacccttcaagtgtggagctttctagtaggtgtccttcatagctcagaaacatacctcagaacaagccattcatgacttacctgtaatgggaaaataaatcattctatcagatcagcagtttcgatgtctgagtgatttcgatatgcttcacagaga

SEQ ID NO: 184 - DNA, 1284 bp, Homo sapiens
  misc_feature: Incyte ID No: 1097669.1
ccagaggcttaatcacaccgtcctccacgccatttccttttccttcaagcctagcccttctctcatcatttctctctgaccctctccccactgctcatttggatcccaggggagtgttcagggccagccctggctggcatggagggtgaggctgggtgtctggaagcatggagcatgggactgttcttttacaagacaggaccctgggaccacagagggcaggaacttgcacaaaatcacacagccaagccagtcaaggatggatgcagatccagaggtttctggcagccagtacctcctgccccatgctgcccgcttctcaccctatgtgggtgggaccacagactcacatcctgaccttgcacaaacagcccctctggacacagccccatgtacacggcctcaagggatgtctcacatcctctgtctatttgagacttagaaaaatcctacaaggctggcagtgacagaactaagatgatcatctccagtttatagaccagaaccagagctcagagaggctagatgattgattaccaagtgccggactagcaagtgctggagtcgggactaacccaggtcccttgtcccaagttccactgctgcctcttgaatgcagggacaaatgccacacggctctcaccagtggctagtggtgggtactcaatgtgtactttttgggttcacagaagcacagcacccatgggaagggtccatctcagagaatttacgagcagggatgaaggcctccctgtctaaaatccctccttcatcccccgctggtggcagaatctgttaccagaggacaaagcctttggctcttctaatcagagcgcaagctgggagcacaggcactgcaggagagaatgcccagtgaccagtcactgaccctgtgcagaacctcctggaagcgagctttgctgggagagggggtagctagcctgagagggaaccctctaagggacctcaaaggtgattgtgccaggctctgcgcctgccccacaccctcccttaccctcctccagaccattcaggacacagggaaatcagggttacaaatcttcttgatccacttctctcaggatcccctctcttcctacccttcctcaccacttccctcagtcccaactccttttccctatttccttctcctcctgtctttaaagcctgcctcttccaggaagacccccctattgctgctggggctccccatttgcttactttgcatttgtgcccactctccacccctgctcccctgagctgaaataaaaatacaataaactt

SEQ ID NO: 185 - DNA, 4187 bp, Homo sapiens
  misc_feature: Incyte ID No: 227500.1
ccggccccaggcgggctcccggcgctgagcggagacgagtttttctccccgcagaggaggatcctggaaggacgcggagctggggcttgggggatgcagtggcctggacggaggtgactccaacccgggggagcagagtccgtcacgccggcagggaccgagggtctctgcggagctggaggaccttttgtgggatgcctcacggctgctgaggggctgcagcggcagccattgtttgatgtcctgtgactgagaaaccaggctttaaactttatgcctttggagatggagcccaagatgagcaaactggcctttggctgtcagagaagttccacatcagatgatgactctggctgtgcattggaggagtacgcctgggtccccccgggcctgagaccagagcagatccagctctattttgcttgcttaccagaggaaaaagttccttacgttaacagccccggagagaagcatcggattaaacagcttttgtaccagttaccaccacatgataatgaggtacggtattgccagtctttgagtgaagaggagaaaaaagagttgcaggtgttcagtgctcagcggaagaaagaagcactgggaagaggaacaattaagcttctgtccagagcagtcatgcatgctgtgtgtgagcagtgtggtttgaagataaatggaggtgaagttgcagtgttcgcctcccgtgcgggccctggtgtgtgctggcacccatcctgttttgtctgtttcacgtgtaatgagctgctggtcgacctcatctatttttatcaggatggaaaaattcactgtggcaggcaccatgcagaactgctcaaaccacggtgctcagcatgtgacgagataatttttgctgatgagtgcacagaagctgagggtcgccattggcacatgaaacacttctgctgccttgagtgtgaaacggtcctgggaggacagaggtatatcatgaaggacggccgccccttctgctgtggctgttttgagtctctctatgcggagtactgtgaaacctgtggggaacatattggtgtggaccatgcacagatgacctatgacgggcagcactggcacgccacggaagcctgcttttcttgtgcccagtgtaaagcctctttgttgggatgtcccttccttcccaaacagggtcagatttactgctcaaaaacgtgcagtcttggtgaagacgtccatgcctctgattcttccgactctgcatttcagtcagctcgatcaagagactcccgaagaagtgtccgaatgggcaagagcagccggtcagcagatcagtgtagacagtctctcctcttatcgcctgctctgaactacaagtttcctggcctctcaggcaatgctgatgacaccctttctcgaaaattggatgatctgagtctctccagacaaggaacaagttttgccagtgaagaattttggaaaggcagagtagagcaggaaactccagaagaccctgaagaatgggctgatcatgaagattatatgacgcagctcctcctcaagtttggtgataaaagcctctttcagccacagcccaatgagatggatattcgagccagtgagcactggatatctgataacatggttaaaagtaagaccgagttaaagcaaaataaccagagccttgcaagtaaaaaataccagtctgatatgtactgggcacagtcacaagatggactgggcgattctgcttatggcagccacccaggccctgcaagcagtagaaggcttcaggaattggaactggaccatggggcttcagggtataatcatgatgaaacacagtggtatgaagattccctggagtgtctgtcagacctgaaaccagagcaaagtgttcgggattcgatggattctttggcattgtccaatatcacaggggcttcggtggatggagaaaacaagccaaggccatcattgtattctctgcaaaattttgaggagatggaaacagaagattgtgagaagatgagcaatatgggaactttgaactcttccatgctgcacaggagtgcagagtccttaaagagtctaagttcagagttgtgtccagagaaaatcctgcctgaagagaagccagtacatctgccagtgctcagaaggtccaagtctcaatccagaccccagcaggtcaagttttctgatgatgtcattgacaatgggaactatgacattgaaatccggcagcctccgatgagtgaaaggactcggagacgcgtctacaattttgaagagaggggatccaggtctcatcaccaccgccgccggagaagtagaaagtcccgctccgacaatgccctgaatcttgttacagaaagaaaatactctcccaaggacagactgcggctgtacacccccgataactatgagaaatttatacagaataaaagtgcccgggagatccaagcatacatccagaatgctgatctctacggacagtacgcccatgccacttccgattatggcctgcagaacccaggaatgaatcggtttctgggactctacggcgaggatgatgattcctggtgttcttcctcctcctcctcttccgactcggaagaagaaggatattttcttggacaaccaatccctcaaccccggccacagagatttgcctactatacagatgacctttctagtccaccatctgcacttcccacccctcagtttggtcagaggacaacaaaatccaagaagaaaaagggacacaagggcaaaaattgtattatttcttaaccaagtagtgatgcagagcatttgtttaaaacttagccattaaccgtctgaatcgtttccttttcttccgtaggaaagttgtgaaaatagcttaaagtgctttctttgcccatgtaaatgagaactcaactgctgtttacagtgtcagattaacatttgaaaggtgtgatttctccaatttaccctctttggatggtgccaggtggacgtgacatctcgtgcctgtccggtgcgggtgcgttacagatggacgtagctgctttggttttccagtcctcaagggaatactgaagatgctgactgaaggggattggatgttgattttagaagatggagaactccagccacctttgtaaagcactagtgtttgtcatttatgtaagtcaggtcggctcaggtcttgatagtccgtcttggtgtgaggcatgcctgtcacgatgacctagctaacactgtgcatcttattgtgaggccagcttgtcccctcgaaccctctttggccaggtaaacattgtattgtatcagcgccagctacagattgaaaaaaaaaacaaaaaacattgctatttataacttagtatttcatagacttaagtgtattcctaatttaacggtgcaaatattaatgtatatactgtacagttcagattttaaagctgatatttttatatccctgaattgtaagccgtttgttacgctgcagtgctagatttgccagggaaccagaatttatggatgaactgattgcttatattttagtcagggtttataaatgtagatggtcaaatttacattgcctagtgatggaaaattcaactttttttgatttttttttccaatattaaaaaaggctctgtatgcatggtggggctatgtaagtactctttaaaactatggccctattaatcttacaagtgttacttatgggtcaagcaatgtaaactgtataaatgtaaaaacaacccctccacacacataacccctggaatatatggtaaaaacaagtagaagctgtttcagcgagtgggttttttccccctgcctgcggggggtgcctttctcattttcagcaaggtgatgattatctcatgggaaatgacaaagatctgcttttgtggcagaggactttgtagatttgttattttaagagaggttattcctttttattccttccctcccactaatttgttggcctttaacagcaattttgaaaactgggtcttctggttatgtttttgttttaaaatctttaaattagaggatgctgtgccattgagtactttaagttaatatgaggttctggttcaaggaaaacttacgttggatctgaaccaatgagcagatattttgatatgtgccactcttgcatatacatctcagtcctaactaaagattctagtggcatccaggacctttag

SEQ ID NO: 186 - DNA, 3517 bp, Homo sapiens
  misc_feature: Incyte ID No: 1044033.7
gcgcccccgagcagcgcccgcgccctccgcgccttctccgccgggacctcgagcgaaagacgcccgcccgccgcccagccctcgcctccctgcccaccgggcacaccgcgccgccaccccgaccccgctgcgcacggcctgtccgctgcacaccagcttgttggcgtcttcgtcgccgcgctcgccccgggctactcctgcgcgccacaatgagctcccgcatcgccagggcgctcgccttagtcgtcacccttctccacttgaccaggctggtgagttggactctccttttgccacctattccccgtccgctctccagccccttcccctggtcccagattgcccacggcaggaaaagttaaaaagttcgcgatcgtttgcgggtagccgtttctttaagcactctccccctccccccgaagacgtgtcgggacctcttggtgggagcagccttccgaggtggccaggctggacgagatcagaggctccccgtcgatagggtcggagacccccgtccctcactgcggcagccgcggcgcccctcctgcgcaccgcgccgagtctcacgcgtatcttctcccccttccaggcgctctccacctgccccgctgcctgccactgccccctggaggcgcccaagtgcgcgccgggagtcgggctggtccgggacggctgcggctgctgtaaggtctgcgccaagcagctcaacgaggactgcagcaaaacgcagccctgcgaccacaccaaggggctggaatgcaacttcggcgccagctccaccgctctgaaggggatctgcagaggtaagatgcttgtggtttggcccctttaaaaaaaatactagtccccatagtccagaagtttagtaattctgagaccatgtatggtgatgctttgttgttggtagcttggcagaaaggcacatgatttcagcagtctggaatgcaattcagtgtgtctgggcccaacgaaagcgcatacggaaaagtgattcctgactaacttattgttctggtctggagtctccggggaattgtagggaactttaccataaattgaatttaacagcagaaaatatgtatgagtttcaggcggtggtttggaatcttaactttatccccttctacctttctcttttggtgatctttgcagctcagtcagagggcagaccctgtgaatataactccagaatctaccaaaacggggaaagtttccagcccaactgtaaacatcagtgcacatgtattgatggcgccgtgggctgcattcctctgtgtccccaagaactatctctccccaacttgggctgtcccaaccctcggctggtcaaagttaccgggcagtgctgcgaggagtgggtctgtgacgaggatagtatcaaggaccccatggaggaccaggacggcctccttggcaaggagctgggattcgatgcctccgaggtggagttgacgagaaacaatgaattgattgcagttggaaaaggcagctcactgaagcggctccctgtttttggaatggagcctcgcatcctatacaaccctttacaaggccagaaatgtattgttcaaacaacttcatggtcccagtgctcaaagacctgtggaactggtatctccacacgagttaccaatgacaaccctgagtgccgccttgtgaaagaaacccggatttgtgaggtgcggccttgtggacagccagtgtacagcagcctgaaagtaagttccttcagggacgtgtagactgttgcctggcaggtgggtgggatgtgaacatctttttgaagaaagagaaatatcacccctaactttccttctctcctttctcttacagaagggcaagaaatgcagcaagaccaagaaatcccccgaaccagtcaggtttacttacgctggatgtttgagtgtgaagttaccgggcagtgctgcgaggagtgggtctgtgacgaggatagtatcaaggaccccatggaggaccaggacggcctccttggcaaggagctgggattcgatgcctccgaggtggagttgacgagaaacaatgaattgattgcagttggaaaaggcagctcactgaagcggctccctggtaagtggagactgagcacttcagacactgtactgagatgcatttctggtctaaatctttgtagaaatgagtgcttgagcctgtttgtgtcggtatgcctctgagaagtcttccctcttatatgtctctagtttttggaatggagcctcgcatcctatacaaccctttacaaggccagaaatgtattgttcaaacaacttcatggtcccagtgctcaaagacctgtggaactggtatctccacacgagttaccaatgacaaccctgagtgccgccttgtgaaagaaacccggatttgtgaggtgcggccttgtggacagccagtgtacagcagcctgaaagtaagttccttcagggacgtgtagactgttgcctggcaggtgggtgggatgtgaacatctttttgaagaaagagaaatatcacccctaactttccttctctcctttctcttacagaagggcaagaaatgcagcaagaccaagaaatcccccgaaccagtcaggtttacttacgctggatgtttgagtgtgaagaaataccggcccaagtactgcggttcctgcgtggacggccgatgctgcacgccccagctgaccaggactgtgaagatgcggttccgctgcgaagatggggagacattttccaagaacgtcatgatgatccagtcctgcaaatgcaactacaactgcccgcatgccaatgaagcagcgtttcccttctacaggctgttcaatgacattcacaaatttagggactaaatgctacctgggtttccagggcacacctagacaaacaagggagaagagtgtcagaatcagaatcatggagaaaatgggcgggggtggtgtgggtgatgggactcattgtagaaaggaagccttgctcattcttgaggagcattaaggtatttcgaaactgccaagggtgctggtgcggatggacactaatgcagccacgattggagaatactttgcttcatagtattggagcacatgttactgcttcattttggagcttgtggagttgatgacttctgttttctgtttgtaaattatttgctaagcatattttctctaggcttttttccctctttggggttctacagtcgtaaaagagataataagattagtgtggaccacgtttaaagcttttattcgtcctttgaccacaaagtaaatgggagggcacttccatcccttcctgaagggggacacctccactgagtgtctgtgagaggcagctatctgcactcttaactgccaacagaaatcaggtgttttaagactgaatgttttatttatccaaaagtagcttttggggagggaggggaaatgtaatactggaataatttgtaaatgattttaattttatattcagtgaaaagattttatttatggaattaacccatttaataaagaaatatttacct

SEQ ID NO: 187 - DNA, 2085 bp, Homo sapiens
  misc_feature: Incyte ID No: 482336.39
ggagagcggtaaggaatgcctttctggcttcagcagcctggaggatggggacgtctgggcgttgactcctgggttggaacttttcagcccaccccttcccccagtctcttgccactgggtctctctgcttgggcctcagggatctctaggttcttcactccctctccaagcatcctcctccgggaagccttccctcactgagtccgtttccaatgggctggaactgcggtcccccgctgttctctgcggccgtctagggatggcgctcctgcctactccggaccatccctgcttggactgaaagcctgggcttcggcggggcgggcgggcagagggcggagggcggccccaggaggggcctggcagcagagaaacggtggcccgcggccagccccgcccctacctgtggaagcccagccgcccgctcccgcggataaaaggtgcggagtgtccccgaggtcagcgagtgcgcgctcctcctcgcccgccgctaggtccatcccggcccagccaccatgtccatccacttcagctccccggtattcacctcgcgctcagccgccttctcgggccgcggcgcccaggtgcgcctgagctccgctcgccccggcggccttggcagcagcagcctctacggcctcggcgcctcacggccgcgcgtggccgtgcgctctgcctatgggggcccggtgggcgccggcatccgcgaggtcaccattaaccagagcctgctggccccgctgcggctggacgccgacccctccctccagcgggtgcgccaggaggagagcgagcagatcaagaccctcaacaacaagtttgcctccttcatcgacaaggtgcggtttctggagcagcagaacaagctgctggagaccaagtggacgctgctgcaggagcagaagtcggccaagagcagccgcctcccagacatctttgaggcccagattgctggccttcggggtcagcttgaggcactgcaggtggatgggggccgcctggaggcggagctgcggagcatgcaggatgtggtggaggacttcaagaataagtacgaagatgaaattaaccgccgcacagctgctgagaatgagtttgtggtgctgaagaaggatgtggatgctgcctacatgagcaaggtggagctggaggccaaggtggatgccctgaatgatgagatcaacttcctcaggaccctcaatgagacggagttgacagagctgcagtcccagatctccgacacatctgtggtgctgtccatggacaacagtcgctccctggacctggacggcatcatcgctgaggtcaaggcacagtatgaggagatggccaaatgcagccgggctgaggctgaagcctggtaccagaccaagtttgagaccctccaggcccaggctgggaagcatggggacgacctccggaatacccggaatgagatttcagagatgaaccgggccatccagaggctgcaggctgagatcgacaacatcaagaaccagcgtgccaagttggaggccgccattgccgaggctgaggagcgtggggagctggcgctcaaggatgctcgtgccaagcaggaggagctggaagccgccctgcagcgggccaagcaggatatggcacggcagctgcgtgagtaccaggaactcatgagcgtgaagctggccctggacatcgagatcgccacctaccgcaagctgctggagggcgaggagagccggttggctggagatggagtgggagccgtgaatatctctgtgatgaattccactggtggcagtagcagtggcggtggcattgggctgaccctcgggggaaccatgggcagcaatgccctgagcttctccagcagtgcgggtcctgggctcctgaaggcttattccatccggaccgcatccgccagtcgcaggagtgcccgcgactgagccgcctcccaccactccactcctccagccaccacccacaatcacaagaagattcccacccctgcctcccatgcctggtcccaagacagtgagacagtctggaaagtgatgtcagaatagcttccaataaagcagcctcattctgaggcctgagtgatcc

SEQ ID NO: 188 - DNA, 3924 bp, Homo sapiens
  misc_feature: Incyte ID No: 085713.1
  unsure 3902, 3912, 3918, 3920: a, t, c, g, or other
tgtaaccagcattgagaaccactaatccagaggaaaccaggactcctgcttatcttgcacaacttgggtaccctcaaaatatatggtattggcaaagttaatctgagcctaagttccagcacctgtaaaagatggtacgaatttcctaaaagaggttgttgtgaatatgtactctcctgggtttagtccttagctttgcaagaagtccaaaatcttcaagatgatcagcctcaaatcagggactcactaaccgcaaacaaacttgaaagtggctgataactaactggaaagatattactttaatatgtttctcacaaagcctgtgataatcatttgccatatttgtgatcatagaaatttcttgtccctgccctagaaacattgaatcatgttctccaggggagagcctgggaatctatatttttaactgacaccccagttgatttttatcaaagaagtctgggaaacattgtactttaagttattgtattgtcattctggtattgatttatggtaagaggagatacatatttccatttcctagtttttcttgatgtctgtcatccagggtatccttttcttggtatcaaagaatatgaaaaaccaattataatcagaaagtgacttagtatgcatgaaattagagcatagaaaaggatagttttgagggaacatttcattcatattttgacataacctgctgagttttcctgggcccgcaatagccagtagtgtgcagcctcattttcttcagagtcagcatctttctttccccttgcaagcagtctcctgtttctatgaatagtctttgctcagacaaggccaatatacttggtaataattaatttagcttctttgaaatgattaggtcactttttggtttaaaagattaccatggttgtccccaaaatctttgcatgtaccaatttatttcctcctccctagggtcagaatgattttatatttggcttatgaaatgtattaatttgcttcttctggtcaaagataaagtggaaggatgatgagatttttaaaaaattaatgtatcccttgcttctaattctacctacaaagtggaatagtgtgctagttactatatagttcccagtgtatagcttttgactcttttgaagtggtaactagtagttttgttttagaattttgctttcagcttttatcctgagagtggggctcactgaacctctctcctttctaaaatctgtggaaattacttttggtaactaaggcactgcagtgatctcagcatttagtatgagaacctatgtttgccatatttgtagtattgcttttacatctttagatatgttccggtcccacatgcaaggaggtgaacatcaaattaaagaatccattgttatcaatctagtgaagaattcaaggaagacacaagactcttaccaaaatgagtgtgcagattacatcaatgtgcagaaagccagaggactagaggccaagacttgtttcagaaagatggaagagagttctttggaaacccgtagatacagagaagtggtcgattccagacccagacatagaatgtttgaacaaagactcccatttgagactttccggacatacgcagcaccatacaatatttcacaagcaatggaaaagcagttacctcattcaaagaagacatatgactctttccaagatgaacttgaagattacatcaaagtacagaaagccagaggactagatccaaagacttgtttcagaaagatgagagagaactctgtggatactcatgggtacagagaaatggttgattctggacccagatcaagaatgtgtgagcaaagattttcacatgaggcttcccagacctaccaacgaccataccatatttcaccagtggaaagccagttacctcagtggctaccaacccattcaaagaggacatatgattctttccaagatgaacttgaagattacataaaagtgcagaaagccagaggactagagccaaaaacttgtttcagaaagataggagatagctctgtagaaacacacaggaacagagaaatggttgatgtcagacccagacatagaatgttggagcaaaagctcccatgtgagactttccagacctattcaggaccatatagtatttcacaagtagtggaaaaccagttacctcattgcttaccagctcatgatagcaaacagagactagattctattagctactgtcaactcaccagagactgtttcccagaaaaaccagtacccttgagccttaatcagcaagaaaataactctggctcatacagtgtagaatctgaagtttacaagcacctctcttcagaaaacaatactgctgaccatcaagcaggtcataaacggaaacatcagaagagaaaacgacacctagaagaaggcaaagaaaggccagagaaagagcagtccaagcataaaaggaaaaagagttatgaagatacagatttagacaaagacaagagcatcagacaaaggaaaagagaggaggatagagtcaaggtcagttcaggaaagcttaagcatcgaaaaaagaaaaaaagccatgatgtaccctccgagaaagaagaacgtaagcacaggaaagagaaaaagaaatctgttgaagaaaggacagaagaggaaatgctttgggatgagtctattcttggattttgaatgtttagttttgtttacccaaggttgaattgaaaaaaaaaaacagtcaatatggatttagaaaaaggaacacctgatgaagaaaaggagaggtagatacagtcagtgtcacttcaggacacttaggttttttttgtataaaaatttaaattgaattaaaagaaggaaaaaaaaagcccaaacttaacctctgagaaaagaacataagaactcaaggagaacataagagaaaaggaaacctgttacagaaaagacaagaatctgtgttttggaatgagtctattcttgggtattgaacttttagttttgtttgcccaaggattaattgaggaaatcagctaagaaaatggactttagacaaaagcaagaggatcagatgaagaaaaggagaggtagatacagtcagtgtcacttcaggaaagctatttaaaaaaacttgaaatttaattgaaagaagaaacaacaacaaaaaagcctaaacctagcctctgaacaacactaacatgagaacacaagaacttaagagaaaaagaaacctactcaagaaaagacagaagagacagtgatttgggatgagtctactctaggattttcaactttttagttttgttccttcaaagttgaaggaaaaaaagtttggttttataaaattcatgttattgtaatttttctaggtggatggctactttaatctctaaaaaagccaagtgaagtaaaagtattcagtatgccttttcctcaagttactttccttcattttcttaaaaaagaaaaaaaattattaaatgtttctcacatatctcacatataatgtaatttccctaaatgaagttgtctctacttctgctcatcaaattgctgtgatagtgaattatttattcatgggagataatttattttaaaggacagaattaccaagcgttacaaaatcagttctttccttggttttgtgttagtgttggtggtattttattgttgtttttctgtgtttatgtgtctcagctttctccaaggaatatgtatgaaataacttaaactgattttttctttgttaaatctaatttgcagtgtatttttgcattttctagttctgaaagtggaaaatgaaacagtctataataaacttagatgatatatagttttaaaacggtctcaaaaagtactgatataaggtcagtctatattctggaaatgtttatattaaagtgttttaatttctaaaaaanaaaaaaaaanagaaananaaaa

SEQ ID NO: 189 - DNA, 2657 bp, Homo sapiens
  misc_feature: Incyte ID No: 1382915.45
  unsure 30: a, t, c, g, or other
atgaaccatatatggggacacaccatcctnacggtagtccaatagggaaaccatgccatctggattcatgtttgctctattggactaccgtgaggatggtgtgaccccatatatgattttctttaaggatggtttagaaatggaaaaatgttaacaaatgtggcaattattttggatctatcacctgtcatcataactggcttctgcttgtcatccacacaacaccaggacttaagacaaatgggactgatgtcatcttgagctcttcatttattttgactgtgatttatttggagtggaggcattgtttttaaaaaaatcatacgtccactcatttcatagggattgtcacataaaccaaccacatgtaagaaagccaagtttcagaggcctctgaacagaaattttgttttctttatagatatatttggtgacacaaaagcattttttaaaagcctgaacatggcaacagggctactaacagggacaaaggtctattctagtcacagattactttctaattacagcattggattctatgcacgagtcaatagtcaatactgaagtttagaacagtgcgttattttaaaagaaaacattaaagtgccatttaataagtactttattgatattatatcacacagcactttacagtatactcaaagatagcctaaattatgaattaaacatgcaaatattttcttttccaaaatgtggacaaaatgtcttttagagtgcttttgaacactagccttagctactaagcattcatgggtttgatctttcttgcgacatgactttaagtaagttaacaaaaaatgtagctgtagacagtaattgtttgataaatatgaacagttttaaaatggcactgaatttacatctttaatcattttaataggccatccacagcctctcttgtgtctctaattctcaacctccgagtcttaaaggctgtaaaggctcagaaagtgccagctcatgtgggtctctgtaagtgtctatgtcttcatagatgtaaatatgtgctgtatacacacacatacacacacacataaatatactttagaatcaacagatgtgcattgtcagatacaaggttgattctggcatctggataaccaagaaagctgcttttaggtgtctggacaactttgtagaaatggttgacgtagaacagtatagaatgtcttaacctctccaggactgctccaggtaactgacattttgtttatcaatactctggttctgactaaagtgaattttgacatggacatgtcatgtcatgtcatacccacacaagggtctaggtctatgctaagcctttgctctctaaagcattccaccttgagagacgttttcactctgtaatgtctggcacaacttttgtaaaaatattagctgtgaaatttttctgtgatcgcttttttttttctcctcagtaagcataatatttatccttctaaaaaagtatccaaagctccttaggatggttcacctttctctttctctctagtcctggtgttactttgcatccaacactttttcctctcaataatacaggtgcttccactggaagaccacatttcagcaaggactggctctgaatgacacctggattctatggcctttccctccactttgggaagctctttagttagacaggtactgtaggcggcaggagaaaaaaagctaattattacttgttggagtcttgtctcaggcatgctgtggggctgtgcaagattcgctgctctgctgctgttgtcattttgatgctacaattacagagaggcggttcagcacccagccgatcggtgtggctgccaaacacatttgagcatgacaagataaatttgttagacaccagcacagggtgggtgagaggacatcctgctgactttataaagtgatgtggggcagggttgtcgaggtaagtgatgattgtcaagtttgccagagatgatagataactcctttggcagaacacctaggtcattccttttaaagtcaggtagctaagaggctgtttggtttctgcagcgctggctacctacttggggaacatggttgctcacaaaacattcagtacttgggcaaactctgggtgccatggtggccactgctgtctccgggagtgccatgtccacaaaactcagtcatccagacttgcttttgggagcagaagccagaggatgacaggtgccaacagacaggcagggatcaggttatctttggcttcttctttctgtctttctccccctcaactgtgaatgcttttggagcctctgcagtcaagacagagcttttactgagacagcagttgccattttcagctgatagaaactcaggggatagaaggccttccctttgagccgcaggtatggcacacacaactctgcagctctgggcaagtgccttgggatgcccttgtcactagtatggctctgtcctgctaatgccagtctgtcaatacttgattgttcattctttctctttgcctctcaccgaaaagcactcggtgagaggaaatgaactgatattcaaaaagacagtttggtctgacataagaaaacacatattggccgtataaatacttcagacattaagcaaagactggctccaattctaggacaccaaggcaggccacaatgcac

SEQ ID NO: 190 - DNA, 4242 bp, Homo sapiens
  misc_feature: Incyte ID No: 023147.1
tccattggaaaatctgcggaattaatctattaacaccaagttcttgccatgaagaaaaataaacgacaagaagaagttattaatttgttaaatgatgtcctggacactcacttttcacaattagaaggtttgcctcttggcatacagtattttgaaaagctaaatcctgatttcttgttagaaattgttatggagtatctgagcttctgtccaatgcagcctgcaagtcctgggcaacctctttgtccacttctcaggcgttgcatctcagtcctggagactgtagtaagaactgttccaggtcttctgcaaacagtcttcctaatagcaaaagtgaaatatttgtcaggtgatattgaagcagctttcaataaccttcagcactgcttagaacacaatccctcttatgctgatgctcatctgctgctagctcaggtttacttgtctcacagaaaaagtccaattgtgttctcagtctcttgagctttgtctgagctatgattttaaggtgagagactatcctttataccatttgataaaagctcagtcacaaaagaaaatgggagaaatagcagacgccattaaaacactgcatatggcaatgagtttaccaggaatgaaaagaattggagcttccacaaaatcaaaagacagaaaaactgaagttgatacaagcctatcgtttatcgatcatttcttgaattgatagacgttcaccgcttaaatggagagcagcatgaggcaaccaaagtttctacaagatgccagtccactgaatctttcatggaacatctggaagaagtgcgggttacacacttgctcaatgcagaccttgactcctagacctcaaggagatagttgaacgggtcgtgttaagcatccttcagaatgttacagccgaacagccttattttatagaggccagagaaaaaatggcagatatttatctgaagcacagaaaagataaaatggttatatatccacttgtttttagagaaatttgctgaaaagagatggcttaaccctcggtcttttctttctcccttggtgatgcatacatgaatattctagagcctgaagaagccatagtagcatatgagcaagcattaaatcagaacccgaaagatggaacattggcaagcaaaatgggcaaagcacttatcaaaactcctaactacatctcctggggatcacttactataaagcggtgctcgtgaaaactggacaagagaattatcttggctatgacctggttgagctcttattaaaattgaaatggtatgacaaagcagaaaaagttcttcagcatgctctggctcatgaacctgtaaatgaactgtcagctctcatggaggatggacgttgtcaagttcttctagcaaaagtttatagtaaaatggaaaaacttggtgatgcgatcactgcattacaacaggctcgagaattacaagctcgggtactaaaacgtgttcagatggaacagccagatgcagttcctgcacagaaacatttagcagctgaaatttgtgcagagattgcgaaacattctgtggctcagcgagactatgaaaaagccaattaagttttatagagaggctctggttcactgcgaaacagataataagattatgttggaactggcacgattatacctggcacaagatgaccctgattcctgcctgcggcagtgtgctctactgcttcagagtgacccaggataacgaagctgctaccatgatgatggctgatctcatgttcagaaaacaagactatgaacaagcagtgtttcatttacagcagcttttagaacgtaagccagataattatatgacattatctcgtttgattgatctcctaagaagatgtggaaaactcgaggatgtcccaagatttttctcaatggctgagaaacgtaactccagagcaaaattggaaccaggatttcagtattgtaaaggactgtatctttggtacactggagaaccaaatgatgcccttcgacattttaataaagctcgggaaagatcgtgactggggccaaaatgccctttataatatgatagagatctgtttgaatccagataatgaaactgttggaggtgaagtatttgaaaacctggatggagacctgggtaattcaactgagaagcaagaatctgtgcaactggcagtaagaacagcagaaaaacttcttaaggaactaaaacctcagactgttcagggtcacgtaccagcttcgcataatggaaaactattgcttaatggctaccaaacagaaatctaatgttgaacaagcattaaataccttcactgaaatagcagcatctgagaagggagcatatcccagcgctcttgggaatggcaacggcttatatgatcttgaaacagactccacgagccagaaaccagctgaagcgtattgcgaaaatgaattggaatgctattgatgctgaagagtttgagaagagttggctgctacttgctgatatttacattcaatcagcaaaatatgacatggcagaagacctgttaaaacggtgcctgcgtcataatagatcttgctgcaaagcttatgaatatatgggatacattatggaaaaagagcaagcatatacagatgctgcccttgaactatgagatggcatggatcatatagctatcggacaaatccggcagtaggatacaaactggcatttaattactttaaagctgtaaagatatgtggattcaattgacatatgtcaccaggttcttgaagcacatccgacttatccgaaaaatcagaaaggatatacttgataaggcccgtgcgtctttaagaccttgaaaataattttaacttaggtgttggtttaacaggaaatgaaagaaatctaactgttcagttcttcctgttcggaaacaggtttgagctcagtgctttgttattagaagtatacccttttttctccagcagaggttgctggctgtacatcaagagaagtatctatgtgtgatttggtgtttccttatggagttggatgagagctggtctatttgactctgtttatgaattgggtacagatttggtgactctgtggtaaagagctataatgatttctgataaagaatgattttggttaaaatctaggtatattaaataccccgtatcttttctaaggaatattatttcaggaaatatatttaaaatgcattgttctcttttaaagtgtttttgttatattcttttatttatttatttatttttaaagacagagccttgatctgccgcccaggctggagtgcagtggcacgatcttggctcactgcaacctccgcctcctgggtttacgcgattctcctgcttcagcctcccgagtagctgggactaaaggcatgtgccatcacacccggctaattttttgtatttttagtagagatgggatttcaccgtgttagccaggaggggcttgatctcttgaccttgtgatccacctgcctcggcctcccaaagtgctgggattacaggcatgagccaccgcacccagcctgtttttgttgtattctgtgttgtttcaaaaattggaataaatctccctgtaaataactcatgaaaaagacaatatatatattttaaatacatattttaataaaggttttataaatagatgatttatattcctcttggaactcaaaagatgtggtaagttttgcaaatcagggtaagctccccctgcattctgtaatgttaatgggtggtggtatagtacagaaaatgtaactttcattgaaaaatcttttttagaaaagggtagagtgtgtgtttccctttcctttcttgagctcattcttcctgctttcaaggccattgtggtcttaagaaataatcaggtcctgaaacctcaatttaaataggtcccttattagggatatttaaccttagcctagaagacttggtctgcaggtataatttcagacactgtaacatttgatggtaaagggtgaccaaatacttttggtcagcaagggagtcacaaagcacaccatgtgaaggcaacggttttacccagctctgtttaacagcaccctggcatagaagctttcactctcttacactaaatttaacctaatctaaacttaatccttagcattatttttaatttctcatctacatctttttcaaattttccttaaaaattgtagtaaacacagtcctcaattttatttgcatttacaataaacagtatttataagtcaaaaaaa

SEQ ID NO: 191 - DNA, 2220 bp, Homo sapiens
  misc_feature: Incyte ID No: 1138174.1
ctggccgtcgcttacattagagaaatcctacaaatatgaatctcttatgttagtaagggatgagaactaattaaacataagagaatcataccatagagaaatcctacaaatatgaagaatgtgacaaagcttttaaccacttctcaaccctgcctacacgtaagataattcatactggaaggaaaccctacaaatatgaggaatgtctcaaagctttttactgattcttataccttactaaacataaaataattcataaaggagataaattatacaaatgtgaagaatgtggcaaagcttttaacaaatcctcatccattagtaaacataagataattcatactggagagaaaacctacaaatgtgaggaatgtggcaaagcctttagcctgtccctccaatttactgcacataagataatttatactggagagaagccctacaaatgtgaaaaatgtggcaaaccttttaaccaatcctcaacccttactacacattagataattcatgctggagagaaaccctacaaatgtgaaaaatgtggcaaagcttttaaccaattttcaaaccttactaaacataagataactcatacaggagagaaatcttacaaatgtgaagaatgtggtaaagcctttaaccaatcctcaactcttactaaacataggaaaattcatactagacagaaaccctacaactgtgaagaatgtgacaatacatttaaccagtcctcaaaccttattaaacaaaataattcatactggagagaaactctacaaatgtcaagaatgtgggaaagcctttaagcagtcctcaactcttactaagcattaaatattggccgggtgcggtggcttatgcaaaatggctcccagcattttgggaggctgaggtgggtggatcacaaggtcaagagatcgagaccatcctggccaacatggtgaaaccctgtctctactaaaaatacaaaaattatctgggtgtggtggcacgtgcctgtattcccatctactcgggaggcttaggcaggataatcacttgaacctgggaggtggaagttgcagtgagccaagattgtaccactgcactccagtttggcaacagagtgagactccgtctcaaaaaaaatttatactgtacaaaaaccccacaagtgtgaaaaacatggcaaagcctttaagaagccctcaattcttaacagacataagataatttatactggagagaaactctacaaatcagaaagatgtgactacttttgacaacgcctcaaacttttctaaccataaaagtaattatactggtgagaaatcctagaaatctgaagagtgagataaagcctttaaatggttgtcacacttcattgtaggtaagataattcatactggagaaaacgcctacatgtgtgaacaatatggcaaaacttaatgctcacactttattgctaggaaagcatttatacttgagataaattatacaaatataaagactgtgaaaaagccatcattatctgctcacattttactcaacaccagagagttcctgcttaataaaagcattataagtgcaattactgtcaaaagatctttcagaaaatataagcttttttagtgaagagtatttattttgaagttgaacatcacaaatataaaaagggttgtagtgcctttacttgtatcacagatctttttgtagacattttcttctagaggaaaactctgaagcagttgatcaaactttgttcaacatcagggaatttatattgaaaaattgtgcaaatataataaatttggaaaaacaatttttcaaaaactacagcttagaaatcaacagttatactagaatatattttttccagatgcagtaaaagtaaaatatttaatccataattaagtctatgcaaatatcagagaatttatggtagaaatatataaggtactgacacttcagatatactaaatcagagtgctaagtatagaaaatctgaaactaaagttggtagaaaagttatttgtatagaactttaagaggatcagaaggttttttgcagagttataattacattcaaagtatactttatttcttgaaaaatattacagattttttgaaaattgaataatgtcatcattcaactctgaaattatttcctgttgtttcttcattcctattggattcacatgtgaaagcatggggttaattgttgctacatcaaagagagag

SEQ ID NO: 192 - DNA, 433 bp, Homo sapiens
  misc_feature: Incyte ID No: 001306.1
aatgacttcaggaagccagcatttttaataaataggaagtaaattatatttaatgactaaattctcacctaaagttgatactaatattacaataactctcttgtgccctattttggtgttttaaacttctttgctgtacatttaagaaaatcagaatttcagtagactcctcgtgcagtctgaggaggcagtttcctatctggtttgacttaaggggctgcagaagacattcttatcccacatatttcttctgctgatcagtcagcaactgaaattccaactaatggattccattcttccagttaagacatcatctccagaaaactgtgctagttggcatccagcagtgcccaagtattatttaacccactagaacctgtgactgcatcagctttatatcctggacctcagcctggaacaaaggagagctaca

SEQ ID NO: 193 - DNA, 996 bp, Homo sapiens
  misc_feature: Incyte ID No: 016760.1
gaaaggccaaaggcagagtgtgatggcccccgatgtggaggtgtctctgcccagcgtggagacggaatgtccaggccccaggatccatgctggatggtgcgcggcttgagggggacctgtccctggcccacgaggatgtagctgggaaagacagtaagtttcaaggaccaaaactgagcacgtctggttttgaatggtcgtcaaagaaagtttccatgtcttcctctgaaatcgaaggaaatgttacattccatgagaagacttccacatttcccattgtggaatctgttgttcatgaaggtgatcttcatgatccatctcgcgatggtaacttggggcttgctgttggagaagttggaatggattcgaagtttaagaaactgcattttaaagtgcccaaagtttcattttcttctaccaaaactcctaaagatagtttagtcccaggtgcaaagtctagcataggtctttccacgattcctttatcatcttcagaatgctcaagttttgaattacaacaggtttcggcttgttcagagccatccatgcagatgcctaaggtgggttttgctgggtttccatcatcccggcttgatctcactggtcctcactttgaatcttctattctctctccctgtgaggatgttacacttacaaaataccaggtgactgttcccagagctgccttggcccctgagcttgctctggaaattccttctgggtctcaggctgatattcctcttcccaagacagagtgctccactgacctgcagcctccagagggagttccaacatctcaagctgagagtcactctggcccactgaattccatgattcctgtttctcttggtcaggtatcttttcctaaattctataaaccaaagtttgtgttttcagtcccccaaatggcagttcctgagggagacctacatgcagcagtgggtgccccagtcatgtctcctcttagccctggagaaagagtgcagtgccccttgc

SEQ ID NO: 194 - DNA, 598 bp, Homo sapiens
  misc_feature: Incyte ID No: 023037.1
cttgacataagaactgtgttcagtttacattttaaaggacgctgtcaaaaggtttgtgtaccatatatttttttcttacaagaatgtagatgatctaaaccaaactcaacgtgaaaaccaagttaaatcctaggtacatgttagaaaagtttatttacacaggtgagtgttacgcatttggagaactgatacactgaaaatttaccaaagcaccaggtgtgtcatttgctcaggtgcagcagaaattaaaatactattatgatttggtccttaactggttagaaaatgccggtctctccctgtatctgttagagctatgtatctcattttacaatgtaaaatattcgcatcttcaaaaagaaacttagttcctgtgtaagaaccttatttaaatattgatagatgagtcatgcttagctctcatttttacgaggggcttgattatttttatgcagtttttccttaacagattgtaccagctttgagtgcatagaataagaaaccaatgtatgaataatttatatttttggcaagtatccctataaatatgcagcttggaagacctagaaatccagagttgcagtggatacagcgtttg

SEQ ID NO: 195 - DNA, 1364 bp, Homo sapiens
  misc_feature: Incyte ID No: 025731.1
  unsure 1260: a, t, c, g, or other
tctatgaaaatagaagtggggcaattttgtgcttaattccatggtccagatacatcaaaaaatcaatgtgggctgtcaaagaaggtttcttgatagtcatgagtcagcctgattcttgaaaggatatgtggaatataaaattttatttatattccttttgagaaaatactgagaaaaccatcttccctggaaaagagaacgtattgtaaagaaagtacatgaaattgaaggttgaatatccaacatcccccacactgccccagtgtctctgctcccttactgagccttactattattcttcatagccctatcactacctagtctagtattcactgaactgtgtcatccactagaatatgagcataatgagagcagagactacacctgtcggttcagtattctatcctcagcacatagaatggtacctggcacatagcagatgctaaaataaaatttaaatgaataaattaattcaatcaacaccttcaaggtgttattattacctacaactattgtttacaagaggtatgcaccgtggaagatcctggagacacaacaatgaataaagccaagccagttcctgcccccgtggagcttgtagtcaagacattgaacaagtgatcagaaagatgttgactgctgcagcagagggttgcaagctgctcatgagtatataacaagtagccctaaccaaagcattctctcccttggtttaatgtccacccattgaggtgactgctaaatactaatccatgactctatcccttggcattcaaactcacacatccacttacctgcctctccaacctcatctccctccactcacaagagcccatcatattattcatcaaaatgaaactgcacccagttcttctgaacatattactttacaaaactttcatttatgcctggtgactctcatcaggcattcaaaagctttccctcagtgcttcagggctcttccttttcttccctttatacatacacctttatgtatcttcatacgtaccctgcataacctcatatatcttagcatttaccatattctgttgaaaaactgtttccatttctctttacttactagaatgtaaacagatgcacaatgttgagaaaatgaaaagtgacaactttgtttacaagtttagaaattatcagattctcacttaagctctagtctctgtaaagtccacaactactcaataaaagtgaagaaaaatgttaacagagagggaggaatcaaaaacaaagaactatttaaanaaaaaaaaaagcaagtccttgaaacttggagctaatgactgtattagacaagggataagagccaagaagagttgaaaccaagaagggaccaagtagtggctctt

SEQ ID NO: 196 - DNA, 865 bp, Homo sapiens
  misc_feature: Incyte ID No: 063539.1
  unsure 720, 795, 807, 816, 833, 838, 844, 858: a, t, c, g, or other
ccgaatagactgaagtccttttgaccccagatcacatgcctgtttgtcaatgatggctgtttatgaaggtgtctctttgaggtggtggtcatctggcagggtcagtagagcttagattgagccttgtcaaggccctgggtgatgagtgggatttagtttctctagctgtgaaattgaaaggatgctatttaatagtgctattagggagaaaatatttgctctgttgaatactttcaaaatatcattacaatgtacatgctgtgctataccatatagatacattggagccagtgtctcgcatgaaaatattttggatgaatatgtaaaccaatgttacctttgttttttgctctagtttttacagctctgtctgaaggtgcaccaaccttacaaggaagatcaaacagcaagcctgttctttgaagaatacttctttattatcattaaaaaaaatttaggttgcttgcacccaaaggcaaaaaatagccattcctcgtactgaaagaaacaagttactcagataggaaagaagaacagatatttaataaggaaatattccttcctgttcccactttcaggaggcctcttaagacatgaagaggaccaaaataacaattgcagtataacttcacatggtggggtggggggtgtggagttcaaatgtggttgatcaaaatagtgttgttactttcctttagacttgattccaacatgtaaaanaatcaggcactttagtgggagtgattttaacttcagtagtgaaagggcaatgccattaagagttaggggagtgtntctcaaacttcntcctcagangtgctttagaaattgantaccnttgggntgaatttaattttnggaatat

SEQ ID NO: 197 - DNA, 2216 bp, Homo sapiens
  misc_feature: Incyte ID No: 083032.1
atataaccatggaacctgccaaacactaatcctagccaacttcaatccttctttctcttaactatcttctctgaataagttctggacttcaccttaaaataagtttttaggagagtaatatatattcatgggattgtgagggagcattgtagagctgttttcttctcagtcatagtggtggttttcctagctgctatggaaaggtttgttcacttatgagattaggacttttcttaaattcctcattaaatatgaacctaaggcatacccatcatttaccttgattcccatataatttgtgtaagtcatatataagtccattgacaaaataaaaaaataaataattggattccttgtatcaacagaaagccttgtgcttaaaacctgttattcttctttgagccagactaaacagtaacatttacaaaatggtatcagctcaacattaaatctaaggttacttctcacatacatcataaagtcagccatcatctttcatttaggatttcttggggttttctttttgcatatatagattatgtattacttaaatcccaaatacctgtgtgttattttttcctatttttgttacttaatatataatgtttgatgagttatctcaattgactataatcttctaagtcaaaaagaaaacatttaagtacataatataaaaagaactgaacattaacagtaatggggaaattcataatggctaaatatgaaataagctttgtctttgcagttacaaactaattcttgtacattttccttttcactaaaaaaataactaattgatagtttccattcacatgaacaagttataatcaggtttgggatagtatgcccaaaacctatgtttctttactttatattcttaaaatctgagacatgatttttctggaacaaattaagatttcatgtacaatagagtccctttcctaatactgttatgaagaaaccaagttgactaccttatgagagatcagatatttcccttatctcattatattcacagcatatgtttggacatgcgtttcaccaagaaccatgtagtaataagataaatggtaactgaggtactatggaatttttagaacttgattccccaggacatgctacagtaaactaaactatttattcaaaagtaacccaactaattaaagtgaaaaaaaattgttgaatcacaatgaacaaacataaaacaatacttaaatgagaattctgtgtcttttttggttttatctgtgatttattttgtccagtattaaggaatggttatctttatcattcttctaacatgttttggtttctctaatggttcattttcctttagcttgtgaaaattagggcagtttgtccagagccttactcgcaggagacaccagacccaacccatgcttagatttctgttaataaaagggagaagggtatttgaataggtagtaaaggcaggtacaagtttaagggagcagggctatcatatgtactaggtgagatttctataaatgtctgaaaagttacatgcatagtcattggctcaggtaatttctctgaatttgaacttatttgatttatttaaccaagttattataatatgcagttctctttaatcaatcttctattattcaatcatctatccatttattaattcaacaaatatttattaaagtgcctaccatgattatgtgctgtagaaaagacaaggacatttactaggggggattgtgggcccaatcggcatcataagcatgtctgaagcaaaagacaataatcacatccaacggcaccagttcagctcaactttagaattcagcagtaacagtacagatggcctaaagtacatctgtgtgtatctgtacgtgtgcacacacccatgtatatatatttatctatctgtacaaacactacatatgtatacacactatctatgtaaaatataatatatgtataatgcatataaattctaacaagtgtatttgtgttatctttaaaatagaacaattgtatcttgaagtggtaaatgcagagaattggttttattgttgatctgtggatttaatgatttctaggtgaaaaggacgtttaagtgtacaatttcttttcttaatttaatatatttatgtaaatgcatgcctgaaatttggttagattggctgtgttttgtgtcttttaacatgatcaaatgattaaactttatcttatgacttgaaaaa

SEQ ID NO: 198 - DNA, 741 bp, Homo sapiens
  misc_feature: Incyte ID No: 1383092.1
gtaaaaaaaaagccctctcgacttcctttggtgtgtgtgtgtgcttgctggcatgttgtatatacgatcatttcctcacttgtttaaatagtgcagcttgtgttggcagtgctctcactcagctccaaatggtttgcatcatgcttaaagcaccctcctttctcccccttcctccccgcccccctccgccacaaagctctgcactaggaaaacagccagggctttttcccttctctgaggaggagagtgataaataggtgactagagagaagcagacaccatgtgttaacttagaaaaaaaaacttgtaggaatatgaagcattccccactgcctggtttctattttccttcctctgaggactgcgttttaacctgaacgtttttcttgcctgtctgtttatagaaaacaaagccgattccctgttgcgctgttggagactgtggagttcttagtctctgcttatcagttgggttttcagccaggtaaagagtaggggtagtccagtcggcttcacatttcccacgtgtaataacagttactaggctagggaagtagtagccaccgagcttgggagcgaagtgctgtgtggaggcaggaataccctgtgactgacttctctgcagagtagtgaggatcacatcccctggggacaggcctttggggaggctccacaaatgtcttctcaggaggaagtcttttgacctacatgaagtatatactagggacataaggagatgtt

SEQ ID NO: 199 - DNA, 979 bp, Homo sapiens
  misc_feature: Incyte ID No: 1383543.1
catgcagaaatcagaacctggaatctgtttctaagacttatcttcttaatgcctatgtggacaattaaaggatttttctcctcaggactctgaatatgatgaattgtattagtagactttctaatattgagcttttcttaatttgtgaaataaactcagaaagttcctcttggttttaacagtctatttctgtttgtaaatattagtatttctgtggattctgtacttgttccttgttatcctttcattctcttaggttcatttggtctgatggattcaggtaccattgaaattctgatagtttcaaaatcttttatctccaggtttgatctctcttgtgaactctggaactgtattcccaattgtcaattggacatccctacgtatgggacctcagatatttcaaacatgatgtgtccaagtctgtatcacttctggccatcatattgttcttttatttttccaaatttcacatcaccagtaacaaactagctgtgatcatggcagatagcctggaaataaaactcccctttttaccctttgcacagcaaattgacatcaaatcctgtttctacttttttttttttaactattgcttccctattctgtattctcactgctccatcttctgatgtaggaggtcatctgttttcctcttttcctctcctctgactcttaagccctttcccattctctttctcaggaatggctgttaaaatgccaatatggtcttgtaactttcctgtacttagtgaacctccttatttacaccctgtttgtgaagtggctgtgttcaccctgggtggacacggaatgtttttggcatgtacaaagagaattttatgctgcctgtgtacagttattaatttgtaagtacactcagctttttgtatctgtaggtttaatatctgtgtatgtaagcaaacttggatgcaaaatatttgaaataaaatcagatgcttgcatctgtagtgaacat

SEQ ID NO: 200 - DNA, 497 bp, Homo sapiens
  misc_feature: Incyte ID No: 334025.5
ataaattgtagtattacacagattatgacttaccctttagaagaagaagggcagatctgtaggtactaccatttatgggatgctcactatgccctgtttctcttctaaacaatttacatgtaatgtctcattcctcacaataacccttgtaaagtgggcatgattaccatgatttttatagttgaagaacctaagacacagagaccaaggcccatgagctcatagggctgaggcaggatttggaatcaggccatgtcttctccagagcccacatccatcctttctctatattgcctcccacagatgtgctaaaatttatttaactaatcctttatcctctatttgtgttgtctcccattttttattattacaatattactgtggtgaacatgcttaaaaatacattccttggatatctgacaacgtgtttctgaaaaacagattttcataagtaataataaaaataataattaaaaagttttggtatggtaaaaaaa

SEQ ID NO: 201 - DNA, 815 bp, Homo sapiens
  misc_feature: Incyte ID No: 463861.1
  unsure 779: a, t, c, g, or other
caggcctatagccaggtgtctaccaccactgaggggcgtcatggggagctacaaggggtctccagaggcagcggggatgcgttggctctgggggcaccagtgtgacagggcagggcaccgagctgtggccgaggggcagagtgtcagagggcctcctggggaatgctgtctctggcagagaggcagactgcctccactgagggaagaggatctgaggatagagaatggccggtaagaagggagagaagtccttgccccaggggacagggatggtggttttctgagctaaacaagatgaggcctgggactattcaggctcctggcagtgggggctgagcctaaagcagagggcactctaaggccagggagaaagtggcagctgctccaggcaggcacaggtctggaaccagagcatccctgaccaaacccggggactgtgagtcatgcatctcatggcatctgggggcatctaggagggtctctctgctccaggccctcctattctgcgcctgctctcaactggttcctattttataggtggtttctggtctttgtcagctgcctgacatctggagactcaattaagatcccatggtcttcgagctcctgcagctgggggctggggctgggggactgggggtttgaaaatcataatagcattcattaaaaatgatcacaatagcatttattaagcacttgctgtgtgctagacattgtgccacggacatcttgtatattatctcatttcatcctcaaaatctcctgatgttctcttaganaagaggggactttggcttagcagggttgattcatcc

SEQ ID NO: 202 - DNA, 473 bp, Homo sapiens
  misc_feature: Incyte ID No: 474976.9
gctcgaggtacatcattgggaatggagggaaataaatgactggatggtcgctgctttttaagtttcaaattgacattccagacaagcggtgcctgagcctgtgcctgtcttcagatcttcacagcacagttcctgggaaggtggagccaccagcctctccttgaataactgggagatgaaacaggaagctctatgacacacttgatcgaatatgacagacaccgaaaatcacgactcagccccctccagcacctctacctgttgcccgccgatcacagccggaatgcagctgaaagattccctggggcctggttccaaccgcccactgtggactctgaggcctctgcatttgtgggtggtctgcctgtgatattttggtcatgggctggtctggtcggtttcccatttgtctggccagtctctatgtgtcttaatcccttgtccttcattaaaagcaaaactaaagaaaacag

SEQ ID NO: 203 - DNA, 793 bp, Homo sapiens
  misc_feature: Incyte ID No: 898688.1
  unsure 590, 592, 724: a, t, c, g, or other
ggggggagatcacattcattcttcaagaacattaatttcttaatatcgtcctccattcttatcaaagctttcagtggtttcctgttgtctataaacataatagaaaaatatttagtttgcattcagtcttacaaagtgtaacttcaagttactttcttttccactcttattttccatcttgttgttgtttactgtgtctaaaatatgtgctatatatgaattataaaattatgtagacaatatagataaccttgtcatctgatctaatttttaaaaagtgaatttgaatactgccaaactaaggagtatgtgtagtatggagaatttgagaaagacaagtatcagtaaagaagaaacagtatagtaaaacaaaatttttttctgccttggtccattgaaagaaatatttagtttcatataatgtgaacaaaaaccttaattttgaatgaacatttgatacataggaactcattcaaatcattgattttctggttaactttgttagtagtttgtttttttctgagtcttttgttttaatccaggatagtcagtctttttctcctttttacatgcttgaaatggtaaaaatnanatatttttacttattcttaaaaatatttccagaatgtcttacacacacatacacttagaaacaaatacaaatatatagtgatattctctcacattttacagagaaaagcgtagtatacatactttgtttttnaatttcacagtagatcttagaggtcttttaatattagcatactgagaactttctcatttttttcataat

SEQ ID NO: 204 - DNA, 315 bp, Homo sapiens
  misc_feature: Incyte ID No: 898688.2
  unsure 27: a, t, c, g, or other
gggaaataaatagaaaaaaaagaaacntatagattttcaaaaactttggtttatagatgaaaaaatggaggattagaacttttaaagtaattgtcccatgggtcatgcactcccacagaggacctgggccatggtgggattcggtggggggggcggggggctgtgtcaggatgctaaccccaggtgttcctgattttaaataagctgctatccttcctgttatattcatactgcatgttatgagcaaaaggggagagaagtcgccaactttttggagaaaaagaataaaatcccagactttatttttgggatcat

SEQ ID NO: 205 - DNA, 1200 bp, Homo sapiens
  misc_feature: Incyte ID No: 984111.1
  unsure 61, 1173: a, t, c, g, or other
acgaaagttacattttcacacagagtcttgaaagtgtgtttgtattgcaaagtaagaagangggaaggaagagcatttcagacagagagaacagagtaaactaagatctagtgatgtgaaataatggaggattcaagactctaacagaaacatggctcccacataaacataagaaggattgcagaagaggggggcagaagccagatcatgaaaatacatctatacattgctaagaagtttagcatacacagtacctttggaatattttaatcaggggaaagacgaagttatgttttagaaagaatacttcagtaacaatgtgacagatgaattgaaggaaagatgagtacagcattagagacaaaaacttgttgcattcgtccaagggaggaaagtagggtagtagcaataagcttggaggggaaaaagtggataccagagagattcagggataatccactggacttggtgatagactaaatgttaagaggaaaggggaggagtctagaatgatttccaggtaagtttaaaatcctaatggagtcaatgttttattttaatcttaaaaaattgtttacttttatgtggtatttttgtactgatttatttgaagtattaatagcttgctaaatatccttggttgagatcatttgattttcaaaatgttttgatcctttcaatacttacttccaataagtatactttattatctaactctggtccttttggttttgttctaaattcaccttctgcttacttttatgatttactaactctttaacttaatatacctgcatgatgaatgtatttcagaaatttgaatgaaaagtagtattcttcccatatattaaagttagttcacttaaaacctatataaacattttaggttaaaactttaatgttaatcatttgataataataatatacttgttttaagtctatctcttagatattgtagttattttaaacttgatcactttctgctaatgcatactgttagtttagtcccatcacatggttaactgactatgtagacttcttaatttaaaaagaaatggcaaaacagacaaaatgctgctaaagaaatttgcaaaggtctcagacaggggaagaatagaaaagaaaaagaatagcagtattcattctctaccttactactcccccccaccttcnattttcaaattccaagtatttagttga

SEQ ID NO: 206 - DNA, 1907 bp, Homo sapiens
  misc_feature: Incyte ID No: 1416548CB1
  unsure 2, 44-46, 50-52, 1885: a, t, c, g, or other
gncggcggcggcggcgatccacagtgattcggccgccgcgccgnnnggtnnnggggctgcgcgggacttttttttttttcagactgaccgcggggcagctgcggagcatgtcgaccccggcccggaggaggctcatgcgggatttcaagcggttacaagaggacccacctgtgggtgtcagtggcgcaccatctgaaaacaacatcatgcagtggaatgcagttatatttggaccagaagggacaccttttgaagatggtacttttaaactagtaatagaattttctgaagaatatccaaataaaccaccaactgttaggtttttatccaaaatgtttcatccaaatgtgtatgctgatggtagcatatgtttagatatccttcagaatcgatggagtccaacatatgatgtatcttctatcttaacatcaattcagtctctgctggatgaaccgaatcctaacagtccagccaatagccaggcagcacagctttatcaggaaaacaaacgagaatatgagaaaagagtttcggccattgttgaacaaagctggaatgattcataatagacaactggtctgttaatctttttcatcattgttgtgtataatttacctctcattagaaaggctaacaaattttaagtgccacaggttttaaggattctgcagaaaaaaaagaaaaaagtccttcagtttagaacctacaaaagcttgtgtatcttgattaatgtactttttattgcatggtgtgaactaagttattgctgcataaatttgtaatatatcctgtttgtatttttttccaagtgtataatgttggtgtggagttttcatgacagaatatacacattttgtaaatctgtacttttttcaaatattgaatgccttatttttgaattctttagatttttaaattggagaaaagcacttaaagttttttatatatgaatattacatgtaaagctgttaaaatacataacttcagtgcaagagactttgtcacttatttccttatgtgtgtaggaggggttaataagtctctagctctccatctattgatagtttcatttacaatttcaaaagaacattcttatattttatcaaggaagtcttcaaatttgattctaaatagcgattataatctccaactttattttgaatgtacctctattagtttcaattgagtaattctagacataactggtttgactctgtccaactctgtatttaggccatttgttacagtttcttcatgcattacttactgttaaaactgtaccttttgcgatttcacagttgggcacttctgccatgagcagagaactgatgcgacttgttttgctgcttggtagcactttaaaaaattttttgattaatgaagaaagtaaaaccataaacatttgccaaaaattcatgccccagtattagcaatgaattagttgcattggtttgagaaaggcacatattggagggaaatcttggtgtaacttaaatatttgaaaattacctttaatgcaatgcatatctgtttattctgggaaatgttttaatgccagggcctgctgagttgcttcttcttgtggagatttttttttttaatctcctgagttgtataaaagttgtactgcatcttagtttactggataaatttaaaacacagtattgtagaaagctaatacaaaactatcctatgccttcaaatagtatagaaaatggaaaatatacaagtaaattctgttgaaccacctgtgtagtctctctagtagttaaaacagctattttagtaaccccaagagtttcttctcatatccataaaattggattacagtatgggcaatatctacagcttctattcattatggcaacgtttaacattgattggntaatgcctataggcggggcagg

SEQ ID NO: 207 - DNA, 4282 bp, Homo sapiens
  misc_feature: Incyte ID No: 1385527.4
gccagttccgtctgtgtgttcgagtggacaaaatggcgaagatcgccaagactcacgaagatattgaagcacagattcgagaaattcaaggcaagaaggcagctcttgatgaagctcaaggagtgggcctcgattctacaggttattatgaccaggaaatttatggtggaagtgacagcagatttgctggatacgtgacatcaattgctgcaactgaacttgaagatgatgacgatgactattcatcatctacgagtttgcttggtcagaagaagccaggatatcatgcccctgtggcattgcttaatgatataccacagtcaacagaacagtatgatccatttgctgagcacagacctccaaagattgcagaccgggaagatgaatacaaaaagcataggcggaccatgataatttccccagagcgtcttgatccttttgcagatggagggaagacccctgatcctaaaatgaatgctaggacttacatggatgtaatgcgagaacaacacttgactaaagaagaacgagaaattaggcaacagctagcagaaaaagctaaagctggagaactaaaagtcgtcaatggagcagcagcgtcccagcctccatcaaaacgaaaacggcgttgggatcaaacagctgatcagactcctggtgccactcccaaaaaactatcaagttgggatcaggcagagacccctgggcatactccttccttaagatgggatgagacaccaggtcgtgcaaagggaagcgagactcctggagcaaccccaggctcaaaaatatgggatcctacacctagccacacaccagcgggagctgctactcctggacgaggtgatacaccaggccatgcgacaccaggccatggaggcgcaacttccagtgctcgtaaaaacagatgggatgaaacccccaaaacagagagagatactcctgggcatggaagtggatgggctgagactcctcgaacagatcgaggtggagattctattggtgaaacaccgactcctggagccagtaaaagaaaatcacggtgggatgaaacaccagctagtcagatgggtggaagcactccagttctgacccctggaaagacaccaattggcacaccagccatgaacatggctacccctactccaggtcacataatgagtatgactcctgaacagcttcaggcttggcggtgggaaagagaaattgatgagagaaatcgcccactttctgatgaggaattagatgctatgttcccagaaggatataaggtacttcctcctccagctggttatgttcctattcgaactccagctcgaaagctgacagctactccaacacctttgggtggtatgactggtttccacatgcaaactgaagatcgaactatgaaaagtgttaatgaccagccatctggaaatcttccatttttaaaacctgatgatattcaatactttgataaactattggttgatgttgatgaatcaacacttagtccagaagagcaaaaagagagaaaaataatgaagttgcttttaaaaattaagaatggaacaccaccaatgagaaaggctgcattgcgtcagattactgataaagctcgtgaatttggagctggtcctttgtttaatcagattcttcctctgctgatgtctcctacacttgaggatcaagagcgtcatttacttgtgaaagttattgataggatactgtacaaacttgatgacttagttcgtccatatgtgcataagatcctcgtggtcattgaaccgctattgattgatgaagattactatgctagagtggaaggccgagagatcatttctaatttggcaaaggctgctggtctggctactatgatctctaccatgagacctgatatagataacatggatgagtatgtccgtaacacaacagctagagcttttgctgttgtagcctctgccctgggcattccttctttattgcccttcttaaaagctgtgtgcaaaagcaagaagtcctggcaagcgagacacactggtattaagattgtacaacagatagctattcttatgggctgtgccatcttgccacatcttagaagtttagttgaaatcattgaacatggtcttgtggatgagcagcagaaagttcggaccatcagtgctttggccattgctgccttggctgaagcagcaactccttatggtatcgaatcttttgattctgtgttaaagcctttatggaagggtatccgccaacacagaggaaagggtttggctgctttcttgaaggctattgggtatcttattcctcttatggatgcagaatatgccaactactatactagagaagtgatgttaatccttattcgagaattccagtctcctgatgaggaaatgaaaaaaattgtgctgaaggtggtaaaacagtgttgtgggacagatggtgtagaagcaaactacattaaaacagagattcttcctcccttttttaaacacttctggcagcacaggatggctttggatagaagaaattaccgacagttagttgatactactgtggagttggcaaacaaagtaggtgcagcagaaattatatccaggattgtggatgatctgaaagatgaagccgaacagtacagaaaaatggtgatggagacaattgagaaaattatgggcaatttgggagcagcagatattgatcataaacttgaagaacaactgattgatggtattctttatgctttccaagaacagactacagaggactcagtaatgttgaacggctttggcacagtggttaatgctcttggcaaacgagtcaaaccatacttgcctcagatctgtggtacagttttgtggcgtttaaataacaaatctgctaaagttaggcaacaggcagctgacttgatttctcgaactgctgttgtcatgaagacttgtcaagaggaaaaattgatgggacacttgggtgttgtattgtatgagtatttgggtgaagagtaccctgaagtattgggcagcattcttggagcactgaaggccattgtaaatgtcataggtatgcataagatgactccaccaattaaagatctgctgcctagactcacccccatcttaaagaacagacatgaaaaagtacaagagaattgtattgatcttgttggtcgtattgctgacaggggagctgaatatgtatctgcaagagagtggatgaggatttgctttgagcttttagagctcttaaaagcccacaaaaaggctattcgtagagccacagtcaacacatttggttatattgcaaaggccattggccctcatgatgtattggctacacttctgaacaacctcaaagttcaagaaaggcagaacagagtttgtaccactgtagcaatagctattgttgcagaaacatgttcaccctttacagtactccctgccttaatgaatgaatacagagttcctgaactgaatgttcaaaatggagtgttaaaatcgctttccttcttgtttgaatatattggtgaaatgggaaaagattacatttatgccgtaacaccgttacttgaagatgctttaatggatagagaccttgtacacagacagacggctagtgcagtggtacagcacatgtcacttggggtttatggatttggttgtgaagattcgctgaatcacttgttgaactatgtatggcccaatgtatttgagacatctcctcatgtaattcaggcagttatgggagccctagagggcctgagagttgctattggaccatgtagaatgttgcaatattatttacagggtctgtttcacccagcccggaaagtcagagatgtatattggaaaatttacaactccatctacattggttcccaggacgctctcatagcacattacccaagaatctacaacgatgataagaacacctatattcgttatgaacttgactatatcttataattttattgtttattttgtgtttaatgcacagctacttcacaccttaaacttgctttgatttggtgatgtaaacttttaaacattgcagatccagtgtagaactggtcatagaggaagagctagaaatccagtagcatgatttttaaataacctgtctttgtttttgatgttaaacagtaaatgccagtagtgaccaagaacacagtgattatatacactatactggagggatttcatttttaattcatctttatgaagatttagaactcattccttgtgtttaaagggaatgtttaattgagaaataaacatttgtgtacaaaatgaaaaaaaaa

SEQ ID NO: 208 - DNA, 1301 bp, Homo sapiens
  misc_feature: Incyte ID No: 1092387.17
ctgctccagacagtgtgctcaggggcgttgccagctcattgctcttatagcctgtgagggaggaagaaagaaacatttgccagccaggctagtgacagaaatggattcgaaatatcagtgtgtgaagctgaatgatggtcacttcatgcctgtcctgggatttggcacctatgcgcctgcagaggttcctaaaagtaaagctttagaggccaccaaattggcaattgaagctggcttccgccatattgattctgctcatttatacaataatgaggagcaggttggactggccatccgaagcaagattgcagatggcagtgtgaagagagaagacatattctacacttcaaagctttggtgcaattcccatcgaccagagttggtccgaccagccttggaaaggtcactgaaaaatcttcaattggattatgttgacctctaccttattcattttccagtgtctgtaaagccaggtgaggaagtgatcccaaaagatgaaaatggaaaaatactatttgacacagtggatctctgtgccacgtgggaggccgtggagaagtgtaaagatgcaggattggccaagtccatcggggtgtccaacttcaaccgcaggcagctggagatgatcctcaacaagccagggctcaagtacaagcctgtctgcaaccaggtggaatgtcatccttacttcaaccagagaaaactgctggatttctgcaagtcaaaagacattgttctggttgcctatagtgctctgggatcccaccgagaagaaccatgggtggacccgaactccccggtgctcttggaggacccagtcctttgtgccttggcaaaaaagcacaagcgaaccccagccctgattgccctgcgctaccagctacagcgtggggttgtggtcctggccaagagctacaatgagcagcgcatcagacagaacgtgcaggtgtttgaattccagttgacttcagaggagatgaaagccatagatggcctaaacagaaatgtgcgatatttgacccttgatatttttgctggcccccctaattatccattttctgatgaatattaacatggagggcattgcatgaggtctaccagaaggccctgcgtgtggatggtgacacagaggatggctctatgctggtgactggacacatcgcctctggttaaatctctcctgcttggtgatttcagcaagctacagcaaagcccattggccagaaaggaaagacaataattttgttttttcattttgaaaaaattaaatgctctctcctaaagattcttcacctaaaaaa

SEQ ID NO: 209 - DNA, 2034 bp, Homo sapiens
  misc_feature: Incyte ID No: 2580013CB1
ggcaccgagctccgtcgtctcgtttccggcggtcgcgcgctcttttctcgggacgggagaggccgtgtagcgtcgccgttactccgaggagataccagtcggtagaggagaagtcgaggttagagggaactgggaggcactttgctgtctgcaatcgaagttgagggtgcaaaaatgcagagtaataaaacttttaacttggagaagcaaaaccatactccaagaaagcatcatcaacatcaccaccagcagcagcaccaccagcagcaacagcagcagccgccaccaccgccaatacctgcaaatgggcaacaggccagcagccaaaatgaaggcttgactattgacctgaagaattttagaaaaccaggagagaagaccttcacccaacgaagccgtctttttgtgggaaatcttcctcccgacatcactgaggaagaaatgaggaaactatttgagaaatatggaaaggcaggcgaagtcttcattcataaggataaaggatttggctttatccgcttggaaacccgaaccctagcggagattgccaaagtggagctggacaatatgccactccgtggaaagcagctgcgtgtgcgctttgcctgccatagtgcatcccttacagttcgaaaccttcctcagtatgtgtccaacgaactgctggaagaagccttttctgtgtttggccaggtagagagggctgtagtcattgtggatgatcgaggaaggccctcaggaaaaggcattgttgagttctcagggaagccagctgctcggaaagctctggacagatgcagtgaaggctccttcctgctaaccacatttcctcgtcctgtgactgtggagcccatggaccagttagatgatgaagagggacttccagagaagctggttataaaaaaccagcaatttcacaaggaacgagagcagccacccagatttgcacagcctggctcctttgagtatgaatatgccatgcgctggaaggcactcattgagatggagaagcagcagcaggaccaagtggaccgcaacatcaaggaggctcgtgagaagctggagatggagatggaagctgcacgccatgagcaccaggtcatgctaatgagacaggatttgatgaggcgccaagaagaacttcggaggatggaagagctgcacaaccaagaggtgcaaaaacgaaagcaactggagctcaggcaggaggaagagcgcaggcgccgtgaagaagagatgcggcggcagcaagaagaaatgatgcggcgacagcaggaaggattcaagggaaccttccctgatgcgagagagcaggagattcggatgggtcagatggctatgggaggtgctatgggcataaacaacagaggtgccatgccccctgctcctgtgccagctggtaccccagctcctccaggacctgccactatgatgccggatggaactttgggattgaccccaccaacaactgaacgctttggtcaggctgctacaatggaaggaattggggcaattggtggaactcctcctgcattcaaccgtgcagctcctggagctgaatttgccccaaacaaacgtcgccgatactaataagttgcagtgtctagtttctcaaaacccttaaaagaaggaccctttttggactagccagaattctaccctggaaaagtgttagggattccttccaatagttagatctaccctgcctgtactactctagggagtatgctggaggcagagggcaagggaggggtggtattaaacaagtcaattctgtgtggtatattgtttaatcagttctgtgtggtgcattcctgaagtctctaatgtgactgttgagggcctggggaaaccatggcaaagtggatccagttagagcccattaatcttgatcattccggttttttttttgtccatcttgtttcatttgcttgccccgcccccgagacggagtcttactctgtcgtccaggctggagtttagtggcatgatctcggctcactgtaatctctgccttcccgggttcaagtttta

SEQ ID NO: 210 - DNA, 4711 bp, Homo sapiens
  misc_feature: Incyte ID No: 994430.9
tgcttgagctctttgggcctctgttttcacgtctgtatgatagaggtggtattgtttgacttgtatttgtgaagtttcaatgagattgataattgtcgattttatgttaatccctagtacatggcctgctgtcaacaccccaggacacccaggatatggtctttgctgtttgattttcctcatccccagtctcaaggggaagccaggacaatgagaccagccacttcccatcaggagtcactgcaaggcccccagggtggggtggtggggagataagaaccgtgagagaagttggcacaaaggagttatgggacaaagggtccaagataggcagaaaagaaaatgttgccagttgatggggaagaaaggaagtcggagggctcagacactgagggggacagaacatctccatgtgcagtctcatctgctaccctgaaggatctggaggtaggaggctctgggcggaggtgcagtgaccccgcaggccagccctccaacctcctcccgcagcggggactgggtgcccctctgccagctgagacagcccacacacaacccagccctaatgatcgttctctctacctctcccccaagtcctcctccgcctcctcctctctgcatgcgcgtcagagcccgtgccaagaacaagcagcagtcctgaactcgaggtccataaaaatcagtcgactgaatgacaccatcaaatctttgaaacaacagaagaaacaagtggaacatcagctggaagaagaaaagaaagcaaacaatgagaaacagaaagctgaaagggagctagagggtcaaatccagagattgaacacagagaaaaagaaactaaatacggacctgtatcacatgaaacattctctcagatactttgaagaagagtccaaggatctggccggccgcctgcaacgttcatcgcagcgtataggagagttagagtggtctctctgtgctgtcgccgccacacagaagaagaagccggatgggttctcgagccgcagtaaagcacttctcaagcggcagttagagcagtccatacgggagcagatactgctgaaaggacacgtgacacagttgaaggagtcgcttaaagaagtccagctggagagagatcaatatgctgaacaaataaaaggagagagggcccagtggcagcagaggatgaggaaaatgtcgcaggaggtttgcacattgaaggaggagaagaagcatgatacgcatcgggtagaggagctggagaggagcttgtccagactcaaaaaccagatggctgagccactgcccccggatgccccagcagtgtcctctgaggtggagctgcaagacctgaggaaggagctggagagagtggcaggagagctccaggctcaggtggaaaacaatcagtgcatcagtctcctgaaccgtgggcaaaaggagaggcttcgcgagcaggaggagaggcttcaggagcagcaggagaggcttcgggaacgggagaagaggcttcagcagctggccgagccacagagcgacttggaggagctgaagcacgagaacaagagcgcactgcagttggagcagcaagtaaaggagctgcaggagaagctgggccaggtgatggagacgctcacctcggccgagaaggagccagaggcagcagtcccagcctcagggactgggggcgagtctagcggccttatggacctcctggaggagaaggcggacctgagggagcatgtggagaaactggaacttggattcatccagtaccggagagagagatgccatcagaacgtacatcgccttctaacagagccaggggacagtgccaaagatgcgtcaccgggaggaggccatcatcaggctggcccaggacaaggaggagaggaaggtgaagctgctggagctgcaggagatggtgttgcggcttgtggcagctacaacgaggggcacggcaaattcctggccgctgcccagaaccctgctgctgaacccagtccaggagccccagccccccaggagctcggggctgccgacaagcatggtgatctttgtgaggcgagcctcaccaacagcgtggagcctgcacaaggagaagccagggagggttcttcccaggacaaccctactgcacagccaatcgtgcagctccttggtgagatgcaggaccaccaggagcacccaggcttgggcagcaactgctgtgtgccatgcttttgctgggcttggctgccgagaagaaggagataaacaccaccatcatcaaagagctgctcaagaaatttttaaaaacgaaacaaagttatggggttaatctcctacacaattcatttacttcatttgaatgttagagctactcatgattatttgtgtttctaatttatagtttaagtttatttgtaaaaagttaaaagagagtgggtctctgtggctctcactgatgttcactctggcatccttcagcatttttcttttttcatttcataattgtaggtcattagcatgcatatcgagtttgcccttacgtggtgggagttcaaacacacaaagacccactctttgcacaaaactgttctcgctggtttggaataggctcccgtgcttttttaatgttattgcagcatggatgtccattacagaattcagataaaatttgctaatgttctgctatgatgtttgatctcatcttaatcacagtgagctcttctatagctcaatatgcggtttgccctcaagtgtgcactgtttattactttgtaatatgccactgtgagtactgacatttagagctgtttaaaggccgagaactggaaacagcctttcctccattttctgtgtattggtgatgggagtgataaccttttgggggagctttctaaatctcacagaagaggaaagtggcctgctctggcaggtatgtgcaggatacagtgtgtttcatctgttccggtgccaagaatgagcagtgtactgtggcagttccctttggatttgtatgtgctctgggctcatgaagatattgcatcgtgagctgcagcagttgcactctttttcaatgacctaaaaagggcttatttccgaggaatgaaaggctgccatcattggctgtgggtgtgaaaaacctttcctagcttagagcatttgtatctacaatacattttaaagtcagagttcgtgttccctgttttaatcacatgactacctgtcccagtacacgaaagggcgctggttggcattcttcttaatgtatttagtgaagatcataagaaatcctttaagagtttaaatgtctctgaaacaggcatacaggctctagtcaagaatgaattagagtgaaggaaagctgtgtgacacctggcattcctctctgttcatggagcttctttgaggcttgaagtttgattttactatctagacctctctggctaatacctattcttcaaccacctcggttactctgacataggaatttacttcttttccttgagtggaaaacactttagaaagtaataacaaacattattataaactaatatatgtgagagtacttagttgaaacaaaaaggaattttagtagacagtattatattatctttgaaaatcaaggagaagtttatgcaacttaaaatgtttacacactgtggtgcaatctactgtttgtgaatgtctgtattatcaggaaacatgtctatacgatcgcagagttgtatttcctcacaaacttctttacgaagagtgaaatacgtttttgtacctctcattttcagtcagggacatactttgtgcaatatttctgtgattgtgcctatgcatgatgaatgaatgcatttcaatcatacattgcctaaatcataacttgatgatgcttgggaaagaatcaacagttaaaacttcatgaagttctaatgtctgtgttccaaaacacatcacattattaggttgtagggagatatgtaggtgtgctccctggggtggggagttttctagttactagaccatctccatttttagcacttggcagcctcatgatccttttataaatgtgagattaacaggagagcagcaatacgattttgccaatggaataacagatttgccggcattcactgaaagagggcagatattgggtccttgtaacttcaactgactcttccaaattgtatgaatttatcaatgtattacacaaatccagtttcagaatgataaaaaatgttagaccaaataatgcggctaattaacagtcgtatgatttctagcccatgggtttaaaactgtatcttaaagagtcattttaaaataatataaatattaaaaaatgtaactgctatcttaatgttctgaaataaaacattttaaaatataaatcctgtagtttaaaaggaagaaatggtgggaaggaaaagtagagaaagaaatgccaattacaggccaaagcgttatttgccaagttttcttagaatgaattttaccaatgtatgagttcttgttaacagaatgtgtaacggaaatactgaaagacttttgcttaaagtggcattattgactgctgatgtgatgctactgtaatgcaataaatttttggtacatggcccgcagtggcttttgccccagaaaggggaaagggacaacccggttagatgatttctaccagccaggaattcctgtgcggtgtcaccatgagcacctccagctgtactagtgccattggaataataaatttgat

SEQ ID NO: 211 - DNA, 2543 bp, Homo sapiens
  misc_feature: Incyte ID No: 1454087CB1
aagggcagctcggatcgtggtagcagggttaagggagaagtgctagaagctggcccccaggcgtggcgcttggaccttgagcagtgccgggctttgcagaaggcatctctggagaaaaggaagcggagaaagaaaggaaggggaatgtggcggaattggggtaagatagggggtgttggggcagggtcgcgcggagctcgaggaaggttttatcagttcgcaggctggagtgcgctctagaagcaagttcgcggcgtagagaggcctttatacctgtgtcggagcgccggcggcagattgtggtactggcgagcaattggactattgttgatatgctaatgaggcgattaggctgttggtaaagagccagagagtagctccacttgggtgcgagaccgagaggggcatatccgttcacgccgatccatgaaaatgctttggaaattgacggataatatcaagtacgaggactgcgaggaccgtcacgacggcaccagcaacgggacggcacggttgccccagctgggcactgtaggtcaatctccctacacgagcgccccgccgctgtcccacacccccaatgccgacttccagcccccatacttccccccaccctaccagcctatctacccccagtcgcaagatccttactcccacgtcaacgacccctacagcctgaaccccctgcacgaccagccgcagccgcagcacccaggctggcccggccagaggcagagccaggagtctgggctcctgcacacgcaccgggggctgcctcaccagctgtcgggcctggatcctcgcagggactacaggcggcacgaggacctcctgcacggcccacacgcgctcagctcaggactcggagacctctcgatccactccttacctcacgccatcgaggaggtcccgcatgtagaagacccgggtattaacatcccagatcaaactgtaattaagaaaggccccgtgtccctgtccaagtccaacagcaatgccgtctccgccatccctattaacaaggacaacctcttcggcggcgtggtgaaccccaacgaagtcttctgttcagttccgggtcgcctctcgctcctcagctccacctcgaagtacaaggtcacggtggcggaagtgcagcggcggctctcaccacccgagtgtctcaacgcgtcgctgctgggcggagtgctccggagggcgaagtctaaaaatggaggaagatctttaagagaaaaactggacaaaataggattaaatctgcctgcagggagacgtaaagctgccaacgttaccctgctcacatcactagtagagggagaagctgtccacctagccagggactttgggtacgtgtgcgaaaccgaatttcctgccaaagcagtagctgaatttctcaaccgacaacattccgatcccaatgagcaagtgacaagaaaaaacatgctcctggctacaaaacagatatgcaaagagttcaccgacctgctggctcaggaccgatctcccctggggaactcacggcccaaccccatcctggagcccggcatccagagctgcttgacccacttcaacctcatctcccacggcttcggcagccccgcggtgtgtgccgcggtcacggccctgcagaactatctcaccgaggccctcaaggccatggacaaaatgtacctcagcaacaaccccaacagccacacggacaacaacgccaaaagcagtgacaaagaggagaagcacagaaagtgaggctctcctcccgccccgcccctcccacgcctcaccagccccccgcgcgcccaccctccggcgggtgacagctccgggatcagcaacccttcctgctgctgctactgctgctgctgctgccgccgccgccgccgccgctgcccttgggtccccccgagtctccgggactgccctctcgactgtcagtggggcagcctctccgactctgcacccgcctcgacctccccacccgctcccacacccctgtgccctcatgtggagcctaagagaacagaacaggccgtgaagccagcagagaaaagttctgccaagtttgtgaacccttttttttttaaacaaaacaacaaatcaacaacagcaacatcaacaacaggaattaaagactttttttctaaatgaaaagtgaaaattaagtaaacttatattgcgcttcatggggtctcgagtcaccacctttcccttaccattactttcagtttcagtattgtaggccattacttaaaatgtaatgttgtatggcgcaaaggatcgatgagcatccttttttgtgcagtattggtggattaagtcttggccacctattagatgtgtttctttgagctgtggtgttgtgtgggtattgttctgatattgatctttttttttcctgggggccgctggttttttgccctttggtggggggttattttcggttgggccttcgccctggtgtttcacgcgtgtgcttggggggcctctggattttcccacttttttgggttgtgggctttccctatttggagatggggtattggttt

SEQ ID NO: 212 - DNA, 2336 bp, Homo sapiens
  misc_feature: Incyte ID No: 2239072CB1
cagcattgagagaagctgctgctgctaatgctgctgctgctgctgccgccgccgccgctgctgctgctgctgttggtctgatgctgcagtaggtttctgtgcagcattgcagaatccacacctagagaacagaagacacagacacgtacgtctactacccttgttagaaggaagctttggatcttcggtggataacaagagtaatccacagacttaaaacatgagctcagatgccagccaaggcgtgattaccactcctcctcctcccagcatgcctcacaaagagagatattttgaccgcatcaatgaaaatgacccagaatacattagggagaggaacatgtctcctgatctacgacaagacttcaacatgatggagcagaggaaacgagttactcagatcctgcaaagtcctgcctttcgggaagacttggaatgccttattcaagaacagatgaagaaaggccacaacccaactggattactagcattacagcagattgcagattacatcatggccaattctttctcgggtttttcttcacctcctctcagtcttggcatggtcacacctatcaatgaccttcctggtgcagatacatcctcatatgtgaagggagaaaaacttactcgctgtaaacttgccagcctgtacagacttgtagacttgtttggatgggcacacctggcaaatacctatatctcagtaagaataagtaaggagcaagaccacattataataattcccagaggcctatctttttctgaagctacagcctccaatttggtgaaagtcaatataataggagaagtggttgaccagggaagtaccaatttgaaaattgaccatacaggattcagtccccatgctgcaatctattcaacacgtcctgatgttaagtgtgtgatacacatccatacccttgcaacagcagctgtatcctccatgaaatgtgggatccttccaatttctcaagagtctcttcttctgggagatgttgcctattatgactaccaagggtcacttgaagaacaggaggagagaattcaactgcagaaggttctgggaccaagttgtaaggtgctggtactcaggaatcatggtgtggttgcacttggagaaacattagaggaggcttttcattatatttttaatgtgcaactagcctgtgagattcaggtgcaggccctagcaggtgcaggtggagtagacaatctccatgtactggactttcagaagtataaagctttcacttacactgtagcagcgtctggtggaggaggtgtgaatatgggttcccatcaaaaatggaaggttggcgaaattgagtttgaagggcttatgaggactctggacaacttggggtatagaacaggctatgcttacaggcatcctctcattcgagagaagcctaggcacaagagtgatgtggaaatcccagcaactgtgactgctttttcctttgaagacgatacagtgccactctctcctctcaaatacatggcacagaggcaacagcgtgaaaaaacaagatggctgaactcaccaaatacttacatgaaagtgaatgtgcctgaggagtctcggaacggagaaaccagtccccgaaccaaaatcacgtggatgaaagcagaagactcatctaaagttagtggtggaacacctatcaaaattgaagatccaaatcagtttgttcctttaaacacaaacccgaatgaggtactagaaaagagaaataagattcgggaacaaaatcgatatgacttgaaaacagcaggaccacaatctcagttgcttgctggaattgttgtggataagccaccttctactatgcaatttgaagatgatgatcatggcccaccagctcctcctaacccatttagtcatctcacagaaggagaacttgaagagtataagaggacaatcgaacgtaaacaacaaggcctagaagaaaaccatgagctgttttccaagagcttcatctccatggaagtgcctgtcatggtagtaaatggcaaggatgatatgcatgatgttgaagatgagcttgctaagcgagtgagtaggttaagcacaagtacaaccatagaaaacatcgagattactattaagtctccagagaaaatcgaagaagtcctgtcacctgaaggctccccttcaaaatcgccatccaagaaaaagaagaaattccgcactccttcttttctgaaaaagaacaaaaaaaaggagaaagttgaggcctaaataaagtctttttataattattattataacaatgtgacattgcacatctaaataccacatttaagttgatcattaatatgcaatggtagat

SEQ ID NO: 213 - DNA, 908 bp, Homo sapiens
  misc_feature: Incyte ID No: 415620CB1
cactggacctgtgaggcgtgcgaactggtggcagtgagagacttcggcggacatggctcccagcgtgccagcggcagaacccgagtatcctaaaggcatccgggccgtgctgctggggcctcccggggccggtaaagggacccaggcacccagattggctgaaaacttctgtgtctgccatttagctactggggacatgctgagggccatggtggcttctggctcagagctaggaaaaaagctgaaggcaactatggatgctgggaaactggtgagtgatgaaatggtagtggagctcattgagaagaatttggagacccccttgtgcaaaaatggtttttttctggatggcttccctcggactgtaaggcaggcagaaatgctcgatgacctcatggagaagaggaaagaggaagcttgttctttgattgaattcagcatcccagactctctgctgatccgaagaatcacaggaaggctgattcaccccaagagtggccgttctaccacggaggagttcaaccctccaaaagagccctggaaagatggcatcaccgggggacccttgatccgtcgatcagatgataatgaaaaggccttgaaaatccgcctgcaagcctaccacactcaaaccaccccactcatagagtactacaggaaacgggggatccactccggcatcgatgcatcccagacccccgatgtcgtgttcgcaagcatcctagcagccttctccaaagccacatgtaaagacttggttatgtttatctaatgttgggtccaagaaggaatttctttccatccctgtgaggcaatgggtgggaatgataggacaggcaaagagaagcttcctcaggctagcaaaaatatcatttgatgtattgattaaaaaagcacttgcttgatgt

SEQ ID NO: 214 - DNA, 911 bp, Homo sapiens
  misc_feature: Incyte ID No: 232957.3
ggcttcaccatgcacagctgggagcgcctggcagttctggtcctcctagtgagcggccgcctgcgcggcgccgccccgtggtcggatcctgggcggcagagaggccgaggcgcacgcgcggccctacatggcgtcggtgcagctgaacggcgcgcacctgtgcggcggcgtcctggtggcggagcagtgggtgctgagcgcggcgcactgcctggaggacgcggccgacgggaaggtgcaggttctcctgggcgcgcactccctgtcgcagccggagccctccaagcgcctgtacgacgtgctccgcgcagtgccccacccggacagccagcccgacaccatcgaccacgacctcctgctgctacagctgtcggagaaggccacactgggccctgctgtgcgccccctgccctggcagcgcgtggaccgcgacgtggcaccgggaactctctgcgacgtggccggctggggcatagtcaaccacgcgggccgccgcccggacagcctgcagcacgtgctcttgccagtgctggaccgcgccacctgcaaccggcgcacgcaccacgacggcgccatcaccgagcgcttgatgtgcgcggagagcaatcgccgggacagctgcaagggtgactccgggggcccgctggtgtgcgggggcgtgctcgagggcgtggtcacctcgggctcgcgcgtttgcggcaaccgcaagaagcccgggatctacacccgcgtggcgagctatgcggcctggatcgacagcgtcctggcctagggtgccggggcctgaaggtcagggtcacccaagcaacaaagtcccgagcaatgaagtcatccactcctgcatctggttggtctttattgagcacctactatatgcagaaggggaggccgaggtgggaggatcattggat

SEQ ID NO: 215 - DNA, 5866 bp, Homo sapiens
  misc_feature: Incyte ID No: 237550.2
  unsure 4732-5039: a, t, c, g, or other
cgggaggtagtggctggggagtcctgtcgacgctctgttcctgagagcgtgccccggaccgccagctcagaacaggggcagcctgtgtagccgaacggaagctgggagcagccgggactggtggcccgcgcccgagctccgcaggcgggaagcaccctgaatttgggaatgtccctgggagcagctgcggcgtgcacctccctcacccaagggtgccgcggcgacggtcacggggcgcggcgccaccgtgagctgacccaggccaggattctaaatagacggcccaggctcctcctccgcccgggccgcctcacctgcgggcattgccgcgccgcctccgccggtgtagacggcacctgcgccgccttgctcgcgggtctccgcccctcgcccaccctcactgcgccaggcccaggcagctcacctgtactggcgcgggctgcggaagcctgcgtgagccgaggcgttgaggcgcggcgcccacgccactgtcccgagaggacgcaggtggagcgggcgcggcttcgcggaacccggcgccggccgccgcagtggtcccagcctacaccgggttccggggacccggccgccagtgcccggggagtagccgccgccgtcggctgggcaccatgaacagcagcagcgccaacatcacctacgccagtcgcaagcggcggaagccggtgcagaaaacagtaaagccaatcccagctgaaggaatcaagtcaaatccttccaagcggcatagagaccgacttaatacagagttggaccgtttggctagcctgctgcctttcccacaagatgttattaataagttggacaaactttcagttcttaggctcagcgtcagttacctgagagccaagagcttctttgatgttgcattaaaatcctcccctactgaaagaaacggaggccaggataactgtagagcagcaaatttcagagaaggcctgaacttacaagaaggagaattcttattacaggctctgaatggctttgtattagttgtcactacagatgctttggtcttttatgcttcttctactatacaagattatctagggtttcagcagtctgatgtcatacatcagagtgtatatgaacttatccataccgaagaccgagctgaatttcagcgtcagctacactgggcattaaatccttctcagtgtacagagtctggacaaggaattgaagaagccactggtctcccccagacagtagtctgttataacccagaccagattcctccagaaaactctcctttaatggagaggtgcttcatatgtcgtctaaggtgtctgctggataattcatctggttttctggcaatgaatttcccaagggaagttaaagtatcttcatggacagaaaaagaaagggaaagatggatcaatacttccacctcagttggctttgtttgcgatagctactccacttcagccaccatccatacttgaaatccggaccaaaaattttatctttagaaccaaacacaaactagacttcacacctattggttgtgatgccaaaggaagaattgttttaggatatactgaagcagagctgtgcacgagaggctcaggttatcagtttattcatgcagctgatatgctttattgtgccgagtcccatatccgaatgattaagactggagaaagtggcatgatagttttccggcttcttacaaaaaacaaccgatggacttgggtccagtctaatgcacgcctgctttataaaaatggaagaccagattatatcattgtaactcagagaccactaacagatgaggaaggaacagagcatttacgaaaacgaaatacgaagttgccttttatgtttaccactggagaagctgtgttgtatgaggcaaccaacccttttcctgccataatggatcccttaccactaaggactaaaaatggcactagtggaaaagactctgctacacatccactctaagcaaggactctctcaatcctagttccctcctggctgccatgatgcaacaagatgagtctatttatctctatcctgcttcaagtacttcaagtactgcaccttttgaaaacaactttttcaacgaatctatgaatgaatgcagaaattggcaagataatactgcaccgatgggaaatgatactatcctgaaacatgagcaaattgaccagcctcaggatgtgaactcatttgctggaggtcacccagggctctttcaagatagtaaaaacagtgacttgtacagcataatgaaaaacctaggcattgattttgaagacatcagacacatgcagaatgaaaaatttttcagaaatgatttttctggtgaggttgacttcagagacattgacttaacggatgaaatcctgacgtatgtccaagattctttaagtaagtctcccttcataccttcagattatcaacagcaacagtccttggctctgaactcaagctgtatggtacaggaacacctacatctagaacagcaacagcaacatcaccaaaagcaagtagtagtggagccacagcaacagctgtgtcagaagatgaagcacatgcaagttaatggcatgtttgaaaattggaactctaaccaattcgtgcctttcaattgtccacagcaagacccacaacaatataatgtctttacagacttacatgggatcagtcaagagttcccctacaaatctgaaatggattctatgccttatacacagaactttatttcctgtaatcagcctgtattaccacaacattccaaatgtacagagctggactaccctatggggagttttgaaccatccccataccccactacttctagtttagaagattttgtcacttgtttacaacttcctgaaaaccaaaagcatggattaaatccacagtcagccataataactcctcagacatgttatgctggggccgtgtcgatgtatcagtgccagccagaacctcagcacacccacgtgggtcagatgcagtacaatccagtactgccaggccaacaggcatttttaaacaagtttcagaatggagttttaaatgaaacatatccagctgaattaaataacataaataacactcagactaccacacatcttcagccacttcatcatccgtcagaagccagaccttttcctgatttgacatccagtggattcctgtaattccaagcccaattttgaccctggtttttggattaaattagtttgtgaaggattatggaaaaataaaactgtcactgttggacgtcagcaagttcacatggaggcattgatgcatgctattcacaattattccaaaccaaattttaatttttgcttttagaaaagggagtttaaaaatggtatcaaaattacatatactacagtcaagatagaaagggtgctgccacggagtggtgaggtaccgtctacatttcacattattctgggcaccacaaaatatacaaaactttatcagggaaactaagattcttttaaattagaaaatattctctatttgaattatttctgtcacagtaaaaataaaatactttgagttttgagctactggattcttattagttccccaaatacaaagttagagaactaaactagtttttcctatcatgttaacctctgcttttatctcagatgttaaaataaatggtttggtgctttttataaaaagataatctcagtgctttcctccttcactgtttcatctaagtgcctcacatttttttctacctataacactctaggatgtatattttatataaagtattctttttcttttttaaattaatatctttctgcacacaaatattatttgtgtttcctaaatccaaccattttcattaattcaggcatattttaactccactgcttacctactttcttcaggtaaagggcaaataatgatcgaaaaaataattatttattacataatttagttgtttctagactataaatgttgctatgtgccttatgttgaaaaaatttaaaagtaaaatgtctttccaaattatttcttaattattataaaaatattaagacaatagcacttaaattcctcaacagtgttttcagaagaaataaatataccactctttacctttattgatatctccatgatgatagttgaatgttgcaatgtgaaaaatctgctgttaactgcaaccttgtttattaaattgcaagaagctttatttctagctttttaattaagcaaagcacccatttcaatgtgtataaattgtctttaaaaactgttttagacctataatccttgataatatattgtgttgactttataaatttcgcttcttagaacagtggaaactatgtgtttttctcatatttgaggagtgttaagattgcagatagcaaggtttggtgcaaagtattgtaatgagtgaattgaatggtgcattgtatagatataatgaacaaaattatttgtaagatatttgcagtttttcattttaaaaagtccataccttatatatgcacttaatttgttggggctttacatactttatcaatgtgtctttctaagaaatcaagtaatgaatccaactgcttaaagttggtattaataaaaagacaaccacatagttcgtttaccttcaaactttaggtttttttaatgatatactgatcttcattaccaataggcaaattaatcaccctaccaactttactgtcctaacatggtttaaaagaaaaaatgacaccannnnnnnnnnnnnnnnnnnnnnnnnnnnnnnnnnnnnnnnnnnnnnnnnnnnnnnnnnnnnnnnnnnnnnnnnnnnnnnnnnnnnnnnnnnnnnnnnnnnnnnnnnnnnnnnnnnnnnnnnnnnnnnnnnnnnnnnnnnnnnnnnnnnnnnnnnnnnnnnnnnnnnnnnnnnnnnnnnnnnnnnnnnnnnnnnnnnnnnnnnnnnnnnnnnnnnnnnnnnnnnnnnnnnnnnnnnnnnnnnnnnnnnnnnnnnnnnnnnnnnnnnnnnnnnnnnnnnnnnnnnnnnnnnnnnnnnnnnnnnnnnnnnntttttatttcttttactttttttagtaagttaatgtatataaaaatggcttcggacaaaatatctctgagttctgtgtattttcagtcaaaactttaaacctgtagaatcaatttaagtgttggaaaaaatttgtctgaaacatttcataatttgtttccagcatgaggtatctaaggatttagaccagaggtctagattaatactctatttttacatttaaaccttttattataagtcttacataaaccatttttgttactctcttccacatgttactggataaattgtttagtggaaaataggctttttaatcatgaatatgatgacaatcagttatacagttataaaattaaaagtttgaaaagcaatattgtatatttttatctatataaaataactaaaatgtatctaagaataataaaatcacgttaaaccaaatacacgtttgtctgtattgttaagtgccaaacaaaggatacttagtgcactgctacattgtgggatttatttctagatgatgtgcacatctaaggatatggatgtgtctaattttagtcttttcctgtaccaggtttttcttacaatacctgaagacttaccagtattctagtgtattatgaagctttcaacattactatgcacaaactagtgtttttcgatgttactaaattttaggtaaatgctttcatggcttttttcttcaaaatgttactgcttacatatatcatgcatagatttttgcttaaagtatgatttataatatcctcattatcaaagttgtatacaataatatataataaaataacaaatatgaataataaacaa

SEQ ID NO: 216 - DNA, 2715 bp, Homo sapiens
  misc_feature: Incyte ID No: 1404386CB1
gccagcaggctgagggtaggaagtagccgctccgagtggaggcgactgggggctgaagagcgcgccgccctctcgtcccactttccaggtgtgtgatcctgtaaaattaaatcttccaagatgatctggtatatattaattataggaattctgcttccccagtctttggctcatccaggcttttttacttcaattggtcagatgactgatttgatccatactgagaaagatctggtgacttctctgaaagattatattaaggcagaagaggacaagttagaacaaataaaaaaatgggcagagaagttagatcggctaactagtacagcgacaaaagatccagaaggatttgttgggcatccagtaaatgcattcaaattaatgaaacgtctgaatactgagtggagtgagttggagaatctggtccttaaggatatgtcagatggctttatctctaacctaaccattcagagacagtactttcctaatgatgaagatcaggttggggcagccaaagctctgttacgtctccaggatacctacaatttggatacagataccatctcaaagggtaatcttccaggagtgaaacacaaatcttttctaacggctgaggactgctttgagttgggcaaagtggcctatacagaagcagattattaccatacggaactgtggatggaacaagccctaaggcaactggatgaaggcgagatttctaccatagataaagtctctgttctagattatttgagctatgcggtatatcagcagggagacctggataaggcacttttgctcacaaagaagcttcttgaactagatcctgaacatcagagagctaatggtaacttaaaatattttgagtatataatggctaaagaaaaagatgtcaataagtctgcttcagatgaccaatctgatcagaaaactacaccaaagaaaaaaggggttgctgtggattacctgccagagagacagaagtacgaaatgctgtgccgtggggagggtatcaaaatgacccctcggagacagaaaaaactcttttgccgctaccatgatggaaaccgtaatcctaaatttattctggctccagctaaacaggaggatgaatgggacaagcctcgtattattcgcttccatgatattatttctgatgcagaaattgaaatcgtcaaagacctagcaaaaccaaggctgaggcgagccaccatttcaaacccaataacaggagacttggagacggtacattacagaattagcaaaagtgcctggctctctggctatgaaaatcctgtggtgtctcgaattaatatgagaatacaagatctaacaggactagatgtttccacagcagaggaattacaggtagcaaattatggagttggaggacagtatgaaccccattttgactttgcacggaaagatgagccagatgctttcaaagagctggggacaggaaatagaattgctacatggctgttttatatgagtgatgtgtctgcaggaggagccactgtttttcctgaagttggagctagtgtttggcccaaaaaaggaactgctgttttctggtataatctgtttgccagtggagaaggagattatagtacacggcatgcagcctgtccagtgctagttggcaacaaatgggtatccaataaatggctccatgaacgtggacaagaatttcgaagaccttgtacgttgtcagaattggaatgacaaacaggcttccctttttctcctattgttgtactcttatgtgtctgatatacacatttcctagtcttaactttcaggagtttacaattgactaacactccatgattgattcagtcatgaacctcatcccatgtttcatctgtggacaattgcttactttgtgggttcttttaaaagtaacacgaaatcatcatattgcataaaaccttaaagttctgttggtatcacagaagacaaggcagagtttaaagtgaggaattttatatttaaagaactttttggttggataaaaacataatttgagcatccagttttagtatttcactacatctcagttggtgggtgttaagctagaatgggctgtgtgataggaaacaaatgccttacagatgtgcctaggtgttctgtttacctagtgtcttactctgttttctggatctgaagactagtaataaactaggacactaactgggttccatgtgattgccctttcatatgatcttctaagttgatttttttcctcccaagtcttttttaaagaaagtatactgtattttaccaaccccctctcttttcttttagctcctctgtggtgaattaaacgtacttgagttaaaatatttcgattttttttttttttttaatggaaagtcctgcataacaacactgggccttcttaactaaaatgctcaccacttagcctgtttttttatcccttttttaaaatgacagatgattttgttcaggaattttgctgtttttcttagtgctaataccttgcctcttattcctgctacagcagggtggtaatattggcattctgattaaatactgtgccttaggagactggaagtttaaaaatgtacaagtcctttcagtgatgagggaattgattttttttaaaagtctttttcttagaaagccaaaatgtttgtttttttaagattctgaaatgtgttgtgacaacaatgacctatttatgatcttaat

SEQ ID NO: 217 - DNA, 1602 bp, Homo sapiens
  misc_feature: Incyte ID No: 618626CB1
ccgccgcagcccggccgcgccccgccgccgccgccgccgccatgggctgcctcgggaacagtaagaccgaggaccagcgcaacgaggagaaggcgcagcgtgaggccaacaaaaagatcgagaagcagctgcagaaggacaagcaggtctaccgggccacgcaccgcctgctgctgctgggtgctggagaatctggtaaaagcaccattgtgaagcagatgaggatcctgcatgttaatgggtttaatggagagggcggcgaagaggacccgcaggctgcaaggagcaacagcgatggtgagaaggcaaccaaagtgcaggacatcaaaaacaacctgaaagaggcgattgaaaccattgtggccgccatgagcaacctggtgccccccgtggagctggccaaccccgagaaccagttcagagtggactacattctgagtgtgatgaacgtgcctgactttgacttccctcccgaattctatgagcatgccaaggctctgtgggaggatgaaggagtgcgtgcctgctacgaacgctccaacgagtaccagctgattgactgtgcccagtacttcctggacaagatcgacgtgatcaagcaggctgactatgtgccgagcgatcaggacctgcttcgctgccgtgtcctgacttctggaatctttgagaccaagttccaggtggacaaagtcaacttccacatgtttgacgtgggtggccagcgcgatgaacgccgcaagtggatccagtgcttcaacgatgtgactgccatcatcttcgtggtggccagcagcagctacaacatggtcatccgggaggacaaccagaccaaccgcctgcaggaggctctgaacctcttcaagagcatctggaacaacagatggctgcgcaccatctctgtgatcctgttcctcaacaagcaagatctgctcgctgagaaagtccttgctgggaaatcgaagattgaggactactttccagaatttgctcgctacactactcctgaggatgctactcccgagcccggagaggacccacgcgtgacccgggccaagtacttcattcgagatgagtttctgaggatcagcactgccagtggagatgggcgtcactactgctaccctcatttcacctgcgctgtggacactgagaacatccgccgtgtgttcaacgactgccgtgacatcattcagcgcatgcaccttcgtcagtacgagctgctctaagaagggaacccccaaatttaattaaagccttaagcacaattaattaaaagtgaaacgtaattgtacaagcagttaatcacccaccatagggcatgattaacaaagcaacctttcccttcccccgagtgattttgcgaaacccccttttcccttcagcttgcttagatgttccaaatttagaaagcttaaggcggcctacagaaaaaggaaaaaaggccacaaaagttccctctcactttcagtaaaaataaataaaacagcagcagcaaacaaataaaatgaaataaaagaaacaaatgaaataaatattgtgttgtgcagcattaaaaaaaatcaaaataaaaattaaatgtgagcaaagaaaaaaaaaaaaaaa

SEQ ID NO: 218 - DNA, 3686 bp, Homo sapiens
  misc_feature: Incyte ID No: 1344279CB1
gaaaggaggagtccagtgctggaggggcagggacggcggcggcgcacgtcggaacccgccaggtccagggtccaggttccagcgcccggcggcccaggcaccccccgagcccagctccacacaccgttcctggatctcctctccccaggcggagcgtgcccctgcccagtccagtgaccttcgcctgttggagccctggttaatttttgcccagtctgcctgttgtggggctcctcccctttggggatataagcccggcctggggctgctccgttctctgcctggcctgaggctccctgagccgcctccccaccatcaccatggccaagggcttctatatttccaagtccctgggcatcctggggatcctcctgggcgtggcagccgtgtgcacaatcatcgcactgtcagtggtgtactcccaggagaagaacaagaacgccaacagctcccccgtggcctccaccaccccgtccgcctcagccaccaccaaccccgcctcggccaccaccttggaccaaagtaaagcgtggaatcgttaccgcctccccaacacgctgaaacccgattcctaccaggtgacgctgagaccgtacctcacccccaatgacaggggcctgtacgtttttaagggctccagcaccgtccgtttcacctgcaaggaggccactgacgtcatcatcatccacagcaagaagctcaactacaccctcagccaggggcacagggtggtcctgcgtggtgtgggaggctcccagccccccgacattgacaagactgagctggtggagcccaccgagtacctggtggtgcacctcaagggctccctggtgaaggacagccagtatgagatggacagcgagttcgagggggagttggcagatgacctggcgggcttctaccgcagcgagtacatggagggcaatgtcagaaaggtggtggccactacacagatgcaggctgcagatgcccggaagtccttcccatgcttcgatgagccggccatgaaggccgagttcaacatcacgcttatccaccccaaggacctgacagccctgtccaacatgcttcccaaaggtcccagcaccccacttccagaagaccccaactggaatgtcactgagttccacaccacgcccaagatgtccacgtacttgctggccttcattgtcagtgagttcgactacgtggagaagcaggcatccaatggtgtcttgatccggatctgggcccggcccagtgccattgcggcgggccacggcgattatgccctgaacgtgacaggccccatccttaacttctttgctggtcattatgacacaccctacccactcccaaaatcagaccagattggcctgccagacttcaacgccggcgccatggagaactggggactggtgacctaccgggagaactccctgctgttcgaccccctgtcctcctccagcagcaacaaggagcgggtggtcactgtgattgctcatgagctggcccaccagtggttcgggaacctggtgaccatagagtggtggaatgacctgtggctgaacgagggcttcgcctcctacgtggagtacctgggtgctgactatgcggagcccacctggaacttgaaagacctcatggtgctgaatgatgtgtaccgcgtgatggcagtggatgcactggcctcctcccacccgctgtccacacccgcctcggagatcaacacgccggcccagatcagtgagctgtttgacgccatctcctacagcaagggcgcctcagtcctcaggatgctctccagcttcctgtccgaggacgtattcaagcagggcctggcgtcctacctccacacctttgcctaccagaacaccatctacctgaacctgtgggaccacctgcaggaggctgtgaacaaccggtccatccaactccccaccaccgtgcgggacatcatgaaccgctggaccctgcagatgggcttcccggtcatcacggtggataccagcacggggaccctttcccaggagcacttcctccttgaccccgattccaatgttacccgcccctcagaattcaactacgtgtggattgtgcccatcacatccatcagagatggcagacagcagcaggactactggctgatagatgtaagagcccagaacgatctcttcagcacatcaggcaatgagtgggtcctgctgaacctcaatgtgacgggctattaccgggtgaactacgacgaagagaactggaggaagattcagactcagctgcagagagaccactcggccatccctgtcatcaatcgggcacagatcattaatgacgccttcaacctggccagtgcccataaggtccctgtcactctggcgctgaacaacaccctcttcctgattgaagagagacagtacatgccctgggaggccgccctgagcagcctgagctacttcaagctcaagctcatgtttgaccgctccgaggtctatggccccatgaagaactacctgaagaagcaggtcacacccctcttcattcacttcagaaataataccaacaactggagggagatcccagaaaacctgatggaccagtacagcgaggttaatgccatcagcaccgcctgctccaacggagttccagagtgtgaggagatggtctctggccttttcaagcagtggatggagaaccccaataataacccgatccaccccaacctgcggtccactgtctactgcaacgctatcgcccagggcggggaggaggagtgggacttcgcctgggagcagttccgaaatgccacactggtcaatgaggctgacaagctccgggcagccctggcctgcagcaaagagttgtggatcctgaacaggtacctgagctacaccctgaacccggacttaatccggaagcaggacgccacctctaccatcatcagcattaccaacaacgtcattgggcaaggtctggtctgggactttgtccagagcaactggaagaagctttttaacgattatggtggtggctcgttctccttctccaacctcatccaggcagtgacacgacgattctccaccgagtatgagctgcagcagctggagcagttcaagaaggacaacgaggaaacaggcttcggctcaggcacccgggccctggagcaagccctggagaagacgaaagccaacatcaagtgggtgaaggagaacaaggaggtggtgctccagtggttcacagaaaacagcaaatagtccccagcccttgaagtcacccggccccgatgcaaggtgcccacatgtgtccatcccagcggctggtgcagggcctccattcctggagcccgaggcaccagtgtcctcccctcaaggacaaagtctccagcccacgttctctctgcctgtgagccagtctagttcctgatgacccaggctgcctgagcacctcccagcccctgcccctcatgccaaccccgccctaggcctggcatggcacctgtcgcccagtgccctggggctgatctcagggaagcccagctccagggccagatgagcagaagctctcgatggacaatgaacggccttgctgggggccgccctgtaccctctttcacctttccctaaagaccctaaatctgaggaatcaacagggcagcagatctgtatatttttttctaagagaaaatgtaaataaatgatttctagatgaga

SEQ ID NO: 219 - DNA, 3435 bp, Homo sapiens
  misc_feature: Incyte ID No: 235164.22
ggaggatatgaagtccatcttcacttcagagatctcctccgtcttgatatttgtcaacccagaacctggtcgagtggtcagtttcctcggcagcggtaggcgagagcacgcggaggagcgtgcgcgggggccccgggagacggcggcggtggcggcgcgggcagagcaaggacgcggcggatcccactgcgcacagcagcgcactcggtgccccgcgcagggttcgcgatgctgcccggtttggcactgctcctgctggccgcctggacggctcgggcgctggaggtacccactgatggtaatgctggcctgctggctgaaccccagattgccatgttctgtggcagactgaacatgcacatgaatgtccagaatgggaagtgggattcagatccatcagggaccaaaacctgcattgataccaaggaaggcatcctgcagtattgccaagaagtctaccctgaactgcagatcaccaatgtggtagaagccaaccaaccagtgaccatccagaactggtgcaagcggggccgcaagcagtgcaagacccatccccactttgtgattccctaccgctgcttagttggtgagtttgtaagtgatgcccttctcgttcctgacaagtgcaaattcttacaccaggagaggatggatgtttgcgaaactcatcttcactggcacaccgtcgccaaagagacatgcagtgagaagagtaccaacttgcatgactacggcatgttgctgccctgcggaattgacaagttccgaggggtagagtttgtgtgttgcccactggctgaagaaagtgacaatgtggattctgctgatgcggaggaggatgactcggatgtctggtggggcggagcagacacagactatgcagatgggagtgaagacaaagtagtagaagtagcagaggaggaagaagtggctgaggtggaagaagaagaagccgatgatgacgaggacgatgaggatggtgatgaggtagaggaagaggctgaggaaccctacgaagaagccacagagagaaccaccagcattgccaccaccagcatcaccaccacagagtctgtggaagaggtggttcgagttcctacaacagcagccagtacccctgatgccgttgacaagtatctcgagacacctggggatgagaatgaacatgcccatttccagaaagccaaagagaggcttgaggccaagcaccgagagagaatgtcccaggtcatgagagaatgggaagaggcagaacgtcaagcaaagaacttgcctaaagctgataagaaggcagttatccagcatttccaggagaaagtggaatctttggaacaggaagcagccaacgagagacagcagctggtggagacacacatggccagagtggaagccatgctcaatgaccgccgccgcctggccctggagaactacatcaccgctctgcaggctgttcctcctcggcctcgtcacgtgttcaatatgctaaagaagtatgtccgcgcagaacagaaggacagacagcacaccctaaagcatttcgagcatgtgcgcatggtggatcccaagaaagccgctcagatccggtcccaggttatgacacacctccgtgtgatttatgagcgcatgaatcagtctctctccctgctctacaacgtgcctgcagtggccgaggagattcaggatgaagttgatgagctgcttcagaaagagcaaaactattcagatgacgtcttggccaacatgattagtgaaccaaggatcagttacggaaacgatgctctcatgccatctttgaccgaaacgaaaaccaccgtggagctccttcccgtgaatggagagttcagcctggacgatctccagccgtggcattcttttggggctgactctgtgccagccaacacagaaaacgaagttgagcctgttgatgcccgccctgctgccgaccgaggactgaccactcgaccaggttctgggttgacaaatatcaagacggaggagatctctgaagtgaagatggatgcagaattccgacatgactcaggatatgaagttcatcatcaaaaattggtgttctttgcagaagatgtgggttcaaacaaaggtgcaatcattggactcatggtgggcggtgttgtcatagcgacagtgatcgtcatcaccttggtgatgctgaagaagaaacagtacacatccattcatcatggtgtggtggaggttgacgccgctgtcaccccagaggagcgccacctgtccaagatgcagcagaacggctacgaaaatccaacctacaagttctttgagcagatgcagaactagacccccgccacagcagcctctgaagttggacagcaaaaccattgcttcactacccatcggtgtccatttatagaataatgtgggaagaaacaaacccgttttatgatttactcattatcgccttttgacagctgtgctgtaacacaagtagatgcctgaacttgaattaatccacacatcagtaatgtattctatctctctttacattttggtctctatactacattattaatgggttttgtgtactgtaaagaatttagctgtatcaaactagtgcatgaatagattctctcctgattatttatcacatagccccttagccagttgtatattattcttgtggtttgtgacccaattaagtcctactttacatatgctttaagaatcgatgggggatgcttcatgtgaacgtgggagttcagctgcttctcttgcctaagtattcctttcctgatcactatgcattttaaagttaaacatttttaagtatttcagatgctttagagagattttttttccatgactgcattttactgtacagattgctgcttctgctatatttgtgatataggaattaagaggatacacacgtttgtttcttcgtgcctgttttatgtgcacacattaggcattgagacttcaagcttttctttttttgtccacgtatctttgggtctttgataaagaaaagaatccctgttcattgtaagcacttttacggggcgggtggggaggggtgctctgctggtcttcaattaccaagaattctccaaaacaattttctgcaggatgattgtacagaatcattgcttatgacatgatcgctttctacactgtattacataaataaattaaataaaataaccccgggcaagacttttctttgaaggatgactacagacattaaataatcgaagtaattttgggtggggagaagaggcagattcaattttctttaaccagtctgaagtttcatttatgatacaaaagaagatgaaaatggaagtggcaatataaggggatgaggaaggcatgcctggacaaacccttcttttaagatgtgtcttcaatttgtataaaatggtgttttcatgtaaataaatacattcttggaggagc

SEQ ID NO: 220 - DNA, 2300 bp, Homo sapiens
  misc_feature: Incyte ID No: 1430336CB1
gggtgtgacctccgcagccgcagaggaggagcgcacccggcctcgaagaacttctgcttgggtggctgaactctgatcttgacctagagtcatggccatggcaaccaaaggaggtactgtcaaagctgcttcaggattcaatgccatggaagatgcccagaccctgaggaaggccatgaaagggctcggcaccgatgaagacgccattattagcgtccttgcctaccgcaacaccgcccagcgccaggagatcaggacagcctacaagagcaccatcggcagggacttgatagacgacctgaagtcagaactgagtggcaacttcgagcaggtgattgtggggatgatgacgcccacggtgctgtatgacgtgcaagagctgcgaagggccatgaagggagccggcactgatgagggctgcctaattgagatcctggcctcccggacccctgaggagatccggcgcataagccaaacctaccagcagcaatatggacggagccttgaagatgacattcgctctgacacatcgttcatgttccagcgagtgctggtgtctctgtcagctggtgggagggatgaaggaaattatctggacgatgctctcgtgagacaggatgcccaggacctgtatgaggctggagagaagaaatgggggacagatgaggtgaaatttctaactgttctctgttcccggaaccgaaatcacctgttgcatgtgtttgatgaatacaaaaggatatcacagaaggatattgaacagagtattaaatctgaaacatctggtagctttgaagatgctctgctggctatagtaaagtgcatgaggaacaaatctgcatattttgctgaaaagctctataaatcgatgaagggcttgggcaccgatgataacaccctcatcagagtgatggtttctcgagcagaaattgacatgttggatatccgggcacacttcaagagactctatggaaagtctctgtactcgttcatcaagggtgacacatctggagactacaggaaagtactgcttgttctctgtggaggagatgattaaaataaaaatcccagaaggacaggaggattctcaacactttgaatttttttaacttcatttttctacactgctattatcattatctcagaatgcttatttccaattaaaacgcctacagctgcctcctagaatatagactgtctgtattattattcacctataattagtcattatgatgctttaaagctgtacttgcatttcaaagcttataagatataaatggagattttaaagtagaaataaatatgtattccatgtttttaaaagattactttctactttgtgtttcacagacattgaatatattaaattattccatattttcttttcagtgaaaaattttttaaatggaagactgttctaaaatcacttttttccctaatccaatttttagagtggctagtagtttcttcatttgaaattgtaagcatccggtcagtaagaatgcccatccagttttctatatttcatagtcaaagccttgaaagcatctacaaatctctttttttaggttttgtccatagcatcagttgatccttactaagtttttcatgggagacttccttcatcacatcttatgttgaaatcactttctgtagtcaaagtataccaaaaccaatttatctgaactaaattctaaagtatggttatacaaaccatatacatctggttaccaaacataaatgctgaacattccatattattatagttaatgtcttaatccagcttgcaagtgaatggaaaaaaaaataagcttcaaactaggtattctgggaatgatgtaatgctctgaatttagtatgatataaagaaaacttttttgtgctaaaaatactttttaaaatcaattttgttgattgtagtaatttctatttgcactgtgcctttcaactccagaaacattctgaagatgtacttggatttaattaaaaagttcactttgtaaaaaaaaaaaaaaaaaaaaaaaaaaaaaaacacaaatggaagcctacgaagaaagaagacaaccatccgggaaattcattccggattggttccccgcgcgtgtactgcgttctcctaaacgcctgctcatagtcgagccccggcgtagtgggggggcccgtgttatcttccccggggtgccgcgaatatattccacggcttggcgaaaataacgcatgggtaccggattccaaaaattgcggttccctgtgcgaccccggtagaaattggccccaaagcttaaactggtgtggaactt

SEQ ID NO: 221 - DNA, 4084 bp, Homo sapiens
  misc_feature: Incyte ID No: 264021.47
cgcagtttttccttttttcttctgccgtcgccttctctgcctcttctcatcctttctcgctctgctgctctgcagtgtgacgagtccgaatcctcttcccacccagcccgcgcctttcttcttttgcctgcgctgttctatttctccttcggccgccgccgccactgctgcacacagctggtgtcggtgccgcgcttttacccccaagtcgttcccgcagcctatggcccaggccgccttgggtatttctgctcaaggtaaccacatccctctttaaaaattccgccgaaaaagagaagacgctttacccgactctttgggccgttatctcacggcgaactttctgaccaagtatacaactacccagagggcctaggagaagtgctgtatagagagcagttcgacttcaacgctgagccaccttgggaacctagctgatgataggggggttccatctcccaacttgtccattttgttgcatattctaaggacccagacataggcttggtggcccgtctcttgtctttcctggtttatgactttcggctttgtggaatacggctgagatgaaaggatttattgatgatgcaaactactccgttggcctgttggatgaaggaacaaaccttggaaatgttattgataactatgtttatgaacataccctgacagggaaaaatgcattttttgtgggagatcttggaaagattgtgaagaaacacagtcaatggcagaatgtagtggctcagataaagccattctacacagtgaagtgcaactctgctccagctgtacttgagattttggcagctcttggaaccggatttgcttgttccagtaaaaatgaaatggctttagtgcaagagttgggtgtacctccagaaaacattatttacataagtccttgcaagcaagtgtctcagataaagtatgcagcaaaagttggagtgaatatcctgacatgtgacaatgaaattgaattgaagaaaattgcacgtaatcacccaaatgccaaggtcttactacatattgcaacagaagataatattggaggtgaagagggtaacatgaagtttggcactaccctgaagaactgtaggcatctcttggaatgtgctaaggaacttgatgtccaaataattggggttaaatttcatgtttcgagtgcttgcaaagaatctcaagtatatgtacatgctctatctgatgctcgatgtgtgtttgacatggctggagaaattggctttacgatgaacatgttagacattggtggaggattcacgggaactgaatttcaattggaagaggttaatcatgttatcagccctctgttggatatctactttcctgaaggatctggtgttaagataatttcagaacccggaagctactatgtgtcttctgcatttacactcgcagttaatatcatagcaaagaaagttgttgaaaatgataaatttccctctggagtagaaaaaaccggaagtgatgaaccagccttcatgtattatatgaatgatggtgtttatggttcttttgcaagtaaactgtctgaggacttaaataccattccagaggttcacaagaaatacaaggaagatgagcctctgtttacaagcagcctttggggtccatcctgtgatgagcttgatcaaattgtggaaagctgtcttcttcctgagctgaatgtgggagattggcttatctttgataacatgggagcagattctttccatgaaccatctgcttttaatgattttcagaggccagccatttattacatgatgtcattcagtgattggtatgagatgcaagatgctggaattacttcagactcaatgatgaagaacttcttctttgtgccttcttgcattcagctgagccaagaagacagcttttccgctgaagcttaaacaggcattaacgcttctttagatctgaagttgcaggttaagcttgtctggtcaacattccagtgtggaaaaataatttaaacaatcttattctcttaattcttttggcaacaaaaactattagtaatagctatttgggaccagacaaaatcagctttcatctataattcattggggataatgggagatttagataatgtatccagatttaaacctaccagtttgtcctaccccttaagcgtttaaaataaaatatgcaacaaaatggatgacttagtggagatggaagcccattaattgggttccccattaaatcgtttacatacaagaacacagtttttatactaaggatttgtgtttaaagtcttgtaaagttcatgtctttcacccagatatatcaaatgttagaagaccagtgtgacttcattagataacgtttagtgtatttagaatgtgtaaatttgtgctttgaactgtagtttaataaatgtaaaattgcatcatagtatttgttgacctaatgtaacccttgtatgattgcaataaaattttgtgtagattttactgttttttcaggctaaaactttgggaaaggggctagctagcaaaggtagttttgaaatagatgtgtatatggactgttttgaagggtttttttctttatagcccagttaagttttgtttggctcggtgcatttttcatttatttaattagtaatttaagtaaagtgtttggtaaatcattgtgaagttcagattcattatggagagttgatgtgcagtaagcatgatgtttaacaattttaacaccaaaaatgttaatcctgcataaatcaactgtaataataaataggtgtttctgtatagatagaatgcatagagtaccttagtaaatctttgaatcacaatcttttggctgaaatggaagattctgttaaatactttgaataaacttggggggagggaaataaaattgcagaaaactgcagagcactaaaacttaaagaagggctacatctttatccagaaacctgttgctcttttgcacggaatgtttaaattcagagttgggatgggggttggggtgaagcacacttattatcttcagttgcagtgatttcaaatttaggattttttgttgttggtttgaactgtccccttagtttcttgttatttccaatttgttctgcttagtcattacttttaattcttttcttactaaaattttatggtggttgggggaagggagttagcatcactaacctgacagttgttgccaggaatttgctttgtttactgctagtatattagaaatcctagatctcagaatcacaatagtaataaacaacaggggtcattttttcctaacttactctgtgttcaggtgtggaatttctgtctcccaagaggaaatgtgacttcactttggtgccaatggacagaaaattctacctgtgctacataggagaagtttggaatgcacttaatagctggtttttacaccttgatttcgaggtggaaagaaattgatcatgaatctctaataaatttaaatctcttaaaccagtaggtgcttaatattttttgatttgattaatgcccatttaaatctcatgggttctattaaaaatatatatatatagggccccaatccattgccatcaaattgcccttggacttttccaaggtatattatggggttttatgcaaaattccaagctaccatgtaactttttttaaccatttaacaaggagggggaactgtttcctaccttctttacatgttgtgcactgttgtggtccagaaatgccaaacctttttaaagatggtgcaactttgagtccttggcttgactatacaggccttgaacttcatggcatatcaactttgccatatctgcaggagagctgttctatatgaaatagctcagagttgcaaatatcacatgtgaatgatacggtaacttttaagaaatgtctgtattgtatttgaagactgtttgccataaatctgaaatttgaacctatgtatttcaatttggtatgctaaaaagttctgaattaatgtaaagttttttgttataatattgtaatctcagttcaaaagttaactgcaaatataaaacccaatgatttctatatagtaaattgaactgtaaaggtaacttgtg

SEQ ID NO: 222 - DNA, 1732 bp, Homo sapiens
  misc_feature: Incyte ID No: 148793.3
tgcgcgctcccctctcacgcagccaacatgggctccagtggagcacgttgtggcggatgctggggctttcctgcggcatgcggctctgcaggacatcgggaagaacatttacaccatccgggaggtggtcactgagattcgggacaaggccacacgcaggcggctcgctgtcctgccctacgagctgcggttcaaggagcccttaccggaatacgtgcggctggtgactgagttttcaaagaaaacaggagactaccccagcctctctgccacggacatccaagtgcttgcactcacataccagttggaagcagagtttgttggggtgtctcacctaaaacaagaaccacagaaggttaaggtgagctcatcgattcagcacccagaaacacctctgcacatttctggtttccatctgccctacaagcctaaacccccacaagaaacagaaaaaggacactcagcttgtgagcctgagaacctggaatttagttccttcatgttctggagaaaccctttgcccaacatcgatcatgaactgcaggagctgctgattgacagaggtgaggacgttccaagtgaggaggaggaggaggaagaaaacgggtttgaagacagaaaagatgacagcgatgacgacgggggtggctggataacccccagtaacatcaagcagatccagcaggagctggagcagtgtgacgtccccgaggacgtgcgggttggctgcctgaccacagacttcgccatgcagaatgttctgctgcagatggggctgcacgtgctggcggtgaacggcatgctgattcgtgaggcccggagctacatcttgcgctgccatggctgtttcaagacaacgtctgacatgagccgagtgttctgctcacactgtgggaacaagaccctgaagaaagtgtccgtgaccgtcagcgacgacggcaccctgcacatgcacttctcccgcaaccccaaggtgctgaacccccgcggcctccggtactcgcttcccactcccaaagggggcaaatacgccatcaacccccatctcaccgaggatcagcgcttccctcagctgcgactctcccaaaaggccaggcagaaaaccaacgtgttcgcccctgactacatcgccggggtgtcaccctttgtcgagaatgacatctccagccgctcagctaccctgcaggtccgggacagcaccttgggagctgggcggagacgcttaaatcccaacgcttccagaaagaagtttgtgaagaaaaggtgaagagcgagttcccgcaggcaaattggatgggcgtctggccgccgtggagttccggtgacccatttccccagccgtgtcgtctccaggaccacccgatggaaataacaggcgggcttcacggtgcggctctgtccgcccatgccccgctgggtctgcagggaactggactgtcccatggcctgtgagcaccggagcgcctggctgcctgccaaggaagtgcaattgcataaaaacagaaagaacaacgccctggagccaatcttcaagaaaggaatttccaaaggataatatttttctaataaatgcggctgcaacctcctgtgcatttaattaaataggccaaatttttgctgcttaggtcatctcaaggctgatacttgagctgtgtgcccagagatcatgcatttagatttatatttttgccagaaaatacaaggttataataaaactaagaactaccatttc

SEQ ID NO: 223 - DNA, 720 bp, Homo sapiens
  misc_feature: Incyte ID No: 997033.1
gagtggttttacgttgtgtgtagttagcagttgcttcatgggattgttgttgtacctggatctcaggctcagggagcaatgggaagcatgatttttagttggtgccgccgcattcctcggcagaaatttggtggagaatacctgctcctctccagcctgggtgacagagtgagactctgtctcaaaaaaaaattaaataaattattataacctttcagaaatgctgtgtgcattttcatgttcttttttttagcattactgtcactctccctaatgaaatgtacttcagagaagcagtattttgttaaataaatacataacctcattctgaataatgtccctcattttgactataactgtgcttggtttcaaaagcaaaattaaacaaaaatctcagtcccctccgaagtgaactttgtgttaccctgcgtcagaaatgccaagttgtgtttacttttcattcagattttgtgaatatgaacatgctgttataggatctacagatgaatatttaactcaatagaaaaattattttagaacacattgtattggtattacaaccagattatattcttgacgttgacttcattaaaattatctacaatttcctaataatttaagctgtatatggtcttcattgaaaaaagatagatattgttacaggaagcttgttacattatattcttgaccttttggttgataatcttaaatcttaatgta

SEQ ID NO: 224 - DNA, 3400 bp, Homo sapiens
  misc_feature: Incyte ID No: 1275566CB1
gtcagagtttcctgcccaccatctttgtccctggcaaagtgggttttgcgcagtggcttagacctagaaaagaatcgtgacgggcaggaaaccattacaccaccacctgggctgtgctctccggctcccgccgccacccccgccctcgccttcgcctccgcctccggtgcacattaaagatccaaagtcatgactgactccaagtatttcacaaccaataaaaaaggagaaatatttgaactaaaagctgaactcaacaatgaaaagaaagaaaagagaaaggaggctgtgaagaaagtgattgctgctatgaccgtggggaaggatgttagttctctctttccagacgtagtgaactgtatgcagactgacaatctggaactaaagaagcttgtgtatctctacttgatgaactacgccaagagtcagccagacatggccatcatggctgtaaacagctttgtgaaggactgtgaagatcctaatcctttgattcgagccttggcagtcagaaccatggggtgcatccgggtagacaaaattacagaatatctctgtgagccgctccgcaagtgcttgaaggatgaggatccctatgttcggaaaacagcagcagtctgcgtggcaaaactccatgatatcaatgcccaaatggtggaagatcagggatttctggattctctacgggatctcatagcagattcaaatccaatggtggtggctaatgccgtagcggcattatctgaaatcagtgagtctcacccaaacagcaacttacttgatctgaacccacagaacattaataagctgctgacagccctgaatgaatgcactgaatggggccagattttcatcctggactgcctgtctaattacaaccctaaagatgatcgggaggctcagagcatctgtgagcgggtaactccccggctatcccatgccaactcagcagtggtgctttcagcggtaaaagtcctaatgaagtttctagaattgttacctaaggattctgactactacaatatgctgctgaagaagttagcccctccacttgtcactttgctgtctggggagccagaagtgcagtatgtcgccctgaggaacatcaacttaattgtccagaaaaggcctgaaatcttgaagcaggaaatcaaagtcttctttgtgaagtacaatgatcccatctatgttaaactagagaagttggacatcatgattcgtttggcatctcaagccaacattgctcaggttctggcagaactgaaagaatatgctacagaggtggatgttgactttgttcgaaaagctgtgcgggccattggacggtgtgccatcaaggtggagcaatctgcagagcgctgtgtaagcacattgcttgatctaatccagaccaaagtgaattatgtggtccaagaagcaattgttgtcatcagggacatcttccgcaaataccccaacaagtatgaaagtatcatcgccactctgtgtgagaacttagactcgctggatgagccagatgctcgagcagctatgatttggattgtgggagaatatgctgaaagaattgacaatgcagatgagttactagaaagcttcctggagggttttcacgatgaaagcacccaggtgcagctcactctgcttactgccatagtgaagctgtttctcaagaaaccatcagaaacacaggagctagtccagcaggtcttgagtttggcaacacaggattctgataatcctgaccttcgagaccggggctatatttattggcgccttctctcaactgaccctgttacagctaaagaagtagtcttgtctgagaagccactgatctctgaggagacggaccttattgagccaactctgctggatgagctaatctgccacattggttctttggcctctgtgtatcataagcctcccaatgcttttgtggaaggaagtcatggaattcatcgtaaacacttgccaattcatcatgggagcactgatgcaggtgacagccctgttggcactaccactgcaacgaacctggaacagcctcaggttatcccctctcaaggtgatcttctaggggatcttttaaaccttgacctcggtcccccagtcaatgtgccacaggtgtcctccatgcagatgggagcagtggatctcctaggaggaggactagatagtctggtgggacaatccttcatcccatcatcggtgcctgcaacctttgctccttcacctacacctgctgtggtcagcagtggactgaatgacctgtttgaactctccacagggataggcatggcacctggtggatatgtggctcctaaggctgtctggctacctgcagtaaaggctaaaggcttggagatttccggaacatttactcaccgccaagggcacatctatatggaaatgaacttcaccaataaagctctgcagcacatgacagattttgcaatccagtttaacaaaaatagctttggtgtcatccccagcactcctctggccatccatacaccactgatgccaaaccagagcattgatgtctccctgcctctcaataccttgggcccagtcatgaagatggaacctctgaataacctccaggtggctgtgaaaaacaatatcgatgtcttctacttcagctgcctcatcccactcaatgtgctttttgtagaagatggcaaaatggagcgccaggtcttccttgcaacatggaaggatattcccaatgaaaatgaacttcagtttcagattaaggaatgtcatttaaatgctgacactgtttccagcaagttgcaaaacaacaatgtttatactattgccaagaggaatgtggaagggcaggacatgctgtaccaatccctgaagctcactaatggcatttggattttggccgaactacgtatccagccaggaaaccccaattacacgctgtcactgaagtgtagagctcctgaagtctctcaatacatctatcaggtctacgacagcattttgaaaaactaacaagactggtccagtacccttcaaccatgctgtgatcggtgcaagtcaagaactcttaactggaagaaattgtattgctgcgtagaatctgaacacactgaggccacctagcaaggtagtaactagtctaacctgtgctaacattagggcacaacctgttggatagttttagcttcctgtgaacatttgtaaccactgcttcagtcacctcccacctcttgccacctgctgctgctatctgtccttacttgtgggcttctccatgctgtgccaatggctggctttttctacaccctcttttgagtgtagtttggtattttgtaattgagagctcatttcaaaagcagaaaaagacaacaaatattaaagcaaggaaaagtgtaactgaaaaaaaaaa

SEQ ID NO: 225 - DNA, 4087 bp, Homo sapiens
  misc_feature: Incyte ID No: 336376.2
tgccaccgtcttctgtctctacctccctcctggctggccaatggctctgtgttcctgggcctgctgctggctgtccagagtaggggttgcttagagctgtgtgcatccctgcgggtggtgtgggagtgggcggttgtctaaaggcaggtcccctctactgataaacaaggaccggagatagacctagaggctgacattcttggctcccccagcctacaccccccccacctcgatttcccacagagccctagggacgggtagccagctctgtggcatggtatctggaggcaggccagcaacctgatgtgcatgccacggcccgtccctctccccactcagagctgcagtagcctggaggttcagagagccgggctactctgagaagaagacaccaagtggattctgcttcccctgggacagcactgagcgagtgtggagagaggtacagccctcggcctacaagctctttagtcttgaaagcgccacaagcagcagctgctgagccatggctgaaggggaaatcaccaccttcacagccctgaccgagaagtttaatctgcctccagggaattacaagaagcccaaactcctctactgtagcaacgggggccacttcctgaggatccttccggatggcacagtggatgggacaagggacaggagcgaccagcacattcagctgcagctcagtgcggaaagcgtgggggaggtgtatataaagagtaccgagactggccagtacttggccatggacaccgacgggcttttatacggctcacagacaccaaatgaggaatgtttgttcctggaaaggctggaggagaaccattacaacacctatatatccaagaagcatgcagagaagaattggtttgttggcctcaagaagaatgggagctgcaaacgcggtcctcggactcactatggccagaaagcaatcttgtttctccccctgccagtctcttctgattaaagagatctgttctgggtgttgaccactccagagaagtttcgaggggtcctcacctggttgacccaaaaatgttcccttgaccattggctgcgctaacccccagcccacagagcctgaatttgtaagcaacttgcttctaaatgcccagttcacttctttgcagagccttttacccctgcacagtttagaacagagggaccaaattgcttctaggagtcaactggctggccagtctgggtctgggtttggatctccaattgcctcttgcaggctgagtccctccatgcaaaagtggggctaaatgaagtgtgttaaggggtcggctaagtgggacattagtaactgcacactatttccctctactgagtaaaccctatctgtgattcccccaaacatctggcatggctcccttttgtccttcctgtgccctgcaaatattagcaaagaagcttcatgccaggttaggaaggcagcattccatgaccagaaacagggacaaagaaatccccccttcagaacagaggcatttaaaatggaaaagagagattggattttggtgggtaacttagaaggatggcatctccatgtagaataaatgaagaaagggaggcccagccgcaggaaggcagaataaatccttgggagtcattaccacgccttgaccttcccaaggttactcagcagcagagagccctgggtgacttcaggtggagagcactagaagtggtttcctgataacaagcaaggatatcagagctgggaaattcatgtggatctggggactgagtgtgggagtgcagagaaagaaagggaaactggctgaggggataccataaaaagaggatgatttcagaaggagaaggaaaaagaaagtaatgccacacattgtgcttggcccctggtaagcagaggctttggggtcctagcccagtgcttctccaacactgaagtgcttgcagatcatctggggacctggtttgaatggagattctgattcagtgggttgggggcagagtttctgcagttccatcaggtcccccccaggtgcaggtgctgacaatactgctgccttacccgccatacattaaggagcagggtcctggtcctaaagagttattcaaatgaaggtggttcgacgccccgaacctcacctgacctcaactaacccttaaaaatgcacacctcatgagtctacctgagcattcaggcagcactgacaatagttatgcctgtactaaggagcatgattttaagaggctttggcccaatgcctataaaatgcccatttcgaagatatacaaaaacatacttcaaaaatgttaaacccttaccaacagcttttcccaggagaccatttgtattaccattacttgtataaatacacttcctgcttaaacttgacccaggtggctagcaaattagaaacaccattcatctctaacatatgatactgatgccatgtaaaggcctttaataagtcattgaaatttactgtgagactgtatgttttaattgcatttaaaaatatatagcttgaaagcagttaaactgattagtattcaggcactgagaatgatagtaataggatacaatgtataagctactcacttatctgatacttatttacctataaaatgagatttttgttttccactgtgctattacaaattttcttttgaaagtaggaactcttaagcaatggtaattgtgaataaaaattgatgagagtgttagctcctgtttcatatgaaattgaagtaattgttaactaaaaacaattccttagtaactgaactgtcatatttagaatggaaggaaaatgacagtttgtgaaagttcaaagcaatagtgcaattgaagaattgacctaagtaagctgacattatggttaataatagtattttagatttgtgcagcaaaataatttcataacttttttgtttttgttacttggataagatcaatctgttttattttagtaaatctttgcaggcaagttagagaaaatgcagtgtggcttaacgtctctttagtatgaagatttggccagaaaaagatacccagagaggaaatctaagataattataatggtccatactttttattgtatgaatcaaactcaagcataacattggccaagggaaattaaataccattgctaacttgtgaaatggaagtctgtgatttcggagatgcaaagcattgtagtaaaaacaccaatgtgacctcgaccatctcagcccagatatcattcatatatctgttcaatgactattaaggtgcctactgtgtgctaggcactgactggatactggggaccttgtctgtctggtttgctgctgtatcttctcccagggcattatatttatgatgaaagatgctgtggattcaattctttcagtcaagaataaacacagactttgtaggttcctgctgaataaagcaaatcccagaaacccagattttggaagaatcagcaacccccagcataaaataaacccctatcaaaatgtcagaggacatggcaaggtaaacttagcattttcaactttagaaccgggtcagcttcagggggactgctttcaaatcagccaaagagcctgtcagatcttcttagaaggaagaggttggtagttccctgctctgttttgaacatgctctagtttattaacctggggacattcccattgctgtcttaagtaagtctcatagccagctcctgtcacgtgactctcatatggattcattttcgggccagctctgaacaaagcatcatgaacatatgtgcttttggtcgtttgcaatgtgatggtggtggaggtaggtattggtttccttggaaggcatgataagaaagattcacaatggccaacagtgtgtatgaacaaaaaactgattggagcatcagctagtactgaaggtccttgctttgtgtcagaggcaaaggaacccaaggcgccaagtcctcagccttgagtgtactgctgacaactaaactcacaggctgcaaagcagacctctgatgaagatgcctgttatttcacatcactgtctttttgtgtatcatagtctgcaccttacaaatattaataaatgttccaataataggtgaaa

SEQ ID NO: 226 - DNA, 419 bp, Homo sapiens
  misc_feature: Incyte ID No: 1383302.8
  unsure 97: a, t, c, g, or other
ggtcatcgaaaaccgggccatgaaggatgaggagaagatggaactgcaggagatgcagctgaaggaggccaagcacatcgctgaggattcagaccgnaaatatgaagaggtggccaggaagctggtgatcctggaaggagagctggagctctcttctctcctctcctttccattctctctatggggaggggagcaggcaggaggagcagaaattgccaacattgcacagccaggctgggagcagcctagggagagcccccatcatgcccaccacccactctggcactggcttcatcctttacctatccccttccaccctcctttgctgcttaataaattctgaacttggctccatgctgttttcctgccctccagagagcacctctatcgccaccacggagcactggttcactcctgac

SEQ ID NO: 227 - DNA, 3705 bp, Homo sapiens
  misc_feature: Incyte ID No: 327567.50
ctcttgctccctcggccgggcggcggtgactgtgcaccgacgtcggcgcgggctgcaccgccgcgtccgcccgcccgccagcatggccaccaccgccacctgcacccgtttcaccgacgactaccagctcttcgaggagcttggcaagggtgctttctctgtggtccgcaggtgtgtgaagaaaacctccacgcaggagtacgcagcaaaaatcatcaataccaagaaattgtctgcccgggatcaccagaaactagaacgtgaggctcggatatgtcgacttctgaaacatccaaacatcgtgcgcctccatgacagtatttctgaagaagggtttcactacctcgtgtttgaccttgttaccggcggggagctgtttgaagacattgtggccagagagtactacagtgaagcagatgccagccactgtatacatcagattctggagagtgttaaccacatccaccagcatgacatcgtccacagggacctgaagcctgagaacctgctgctggcgagtaaatgcaagggtgccgccgtcaagctggctgattttggcctagccatcgaagtacagggagagcagcaggcttggtttggttttgctggcaccccaggttacttgtcccctgaggtcttgaggaaagatccctatggaaaacctgtggatatctgggcctgcggggtcatcctgtatatcctcctggtgggctatcctcccttctgggatgaggatcagcacaagctgtatcagcagatcaaggctggagcctatgatttcccatcaccagaatgggacacggtaactcctgaagccaagaacttgatcaaccagatgctgaccataaacccagcaaagcgcatcacggctgaccaggctctcaagcacccgtgggtctgtcaacgatccacggtggcatccatgatgcatcgtcaggagactgtggagtgtttgcgcaagttcaatgcccggagaaaactgaagggtgccatcctcacgaccatgcttgtctccaggaacttctcagctgccaaaagcctattgaacaagaagtcggatggcggtgtcaaggagccacaaaccactgtggtacacaacgctacagatgggatcaagggctccacagagagctgcaacaccaccacagaagatgaggacctcaaagtgcgaaaacaggagatcattaagattacagaacagctgattgaagccatcaacaatggggactttgaggcctacacgaagatttgtgatccaggcctcacttcctttgagcctgaggcccttggtaacctcgtggaggggatggatttccataagttttactttgagaatctcctgtccaagaacagcaagcctatccataccaccatcctaaacccacacgtccacgtgattggggaggacgcagcgtgcatcgcctacatccgcctcacccagtacatcgacgggcagggtcggcctcgcaccagccagtcagaagagacccgggtctggcaccgtcgggatggcaagtggctcaatgtccactatcactgctcaggggcccctgccgcaccgctgcagtgagctcagccacaggggctttaggagattccagccggaggtccaaccttcgcagccagtggctctggagggcctgagtgacagcggcagtcctgtttgtttgaggtttaaaacaattcaattacaaaagcggcagcagccaatgcacgcccctgcatgcagccctcccgcccgcccttcgtgtctgtctctgctgtaccgaggtgttttttacatttaagaaaaaaaaaaaagaaaaaaagattgtttaaaaaaaaaaggaatccataccatgatgcgttttaaaaccaccgacagcccttgggttggcaagaaggcaggagtatgtatgaggtccatcctggcatgagcagtggctcacccaccggccttgaagaggtgagcttggcctctctggtccccatggacttagggggaccaggcaagaactctgacagagctttgggggccgtgatgtgattgcagctcctgaggtggcctgcttaccccaggtctaggaatgaacttctttggaacttgcataggcgcctagaatggggctgatgagaacatcgtgaccatcagacctacttgggagagaacgcagagctcccagcctgctgtggaggcagctgagaagtggtggcctcaggactgagagcccggacgttgctgtactgtcttgtttagtgtagaagggaagagaattggtgctgcagaagtgtacccgccatgaagccgatgagaaacctcgtgttagtctgacatgcactcactcatccatttctataggatgcacaatgcatgtgggccctaatattgaggccttatccctgcagctaggagggggaggggttgttgctgctttgcttcgtgttttcttctaacctggcaaggagagagccaggccctggtcagggctcccgtgccgcctttggcggttctgtttctgtgctgatctggaccatctttgtcttgccttttcacggtagtggtccccatgctgaccctcatctgggcctgggccctctgccaagtgcccctgtgggatgggaggagtgaggcagtgggagaagaggtggtggtcgtttctatgcattcaggctgcctttggggctgcctcccttcttattcttccttgctgcacgtccatctcttttcctgtctttgagattgacctgactgctctggcaagaagaagaggtgtccttacagaggcctctttactgaccaactgaagtatagacttactgctggacaatctgcatgggcatcacccctccccgcatgtaacccaaaagaggtgtccagagccaaggcttctaccttcattgtccctctctgtgctcaaggagttccattccaggaggaagagatctataccctaagcagatagcaaagaagataatggaggagcaattggtcatggccttggtttccctcaaaacaacgctgcagatttatctgcacaaacatctccacttttgggggaaaggtgggtagattccagttccctggactaccttcaggaggcacgagagctgggagaagaggcaaagctacaggtttacttgggagccagctgagaagagagcagactcacaggtgctggtgcttggatttagccaggctcctccgagcacctcatgcatgtcccagcccctgggccctagccctttcctgccctgcagtctgcagtgccagcacgcaaatcccttcaccacagggtttcgttttgctggcttgaagacaaatggtcttagaattcattgagacccatagcttcatatggctgctccagccccacttcttagcattcttactcctcttctggggctaatgtcagcatctatagacaatagactattaaaaaatcaccttttaaacaagaaacggaaggcatttgatgcagaatttttgcatgacaacatagaaataatttaaaaatagtgtttgttctgaatgttggtagacccttcatagctttgttacaatgaaaccttgaactgaaaatatttaataaaataacctttaaacagtccattgtgttactgctgttggaggtttacggccagaggcgtagattttagcagcctgggttaccaggttggagagagtacctcctcctactccctttgggtacttttgagaataaaact

SEQ ID NO: 228 - DNA, 1159 bp, Homo sapiens
  misc_feature: Incyte ID No: 001148CB1
ctgggggcggaggaggcgaattagtccgagtggagagagcgagctgagtggttgtgtggtcgcgtctcggaaaccggtagcgcttgcagcatggctgaccaactgactgaagagcagattgcagaattcaaagaagctttttcactatttgacaaagatggtgatggaactataacaacaaaggaattgggaactgtaatgagatctcttgggcagaatcccacagaagcagagttacaggacatgattaatgaagtagatgctgatggtaatggcacaattgacttccctgaatttctgacaatgatggcaagaaaaatgaaagacacagacagtgaagaagaaattagagaagcattccgtgtgtttgataaggatggcaatggctatattagtgctgcagaacttcgccatgtgatgacaaaccttggagagaagttaacagatgaagaagttgatgaaatgatcagggaagcagatattgatggtgatggtcaagtaaactatgaagagtttgtacaaatgatgacagcaaagtgaagaccttgtacagaatgtgttaaatttcttgtacaaaattgtttatttgccttttctttgtttgtaacttatctgtaaaaggtttctccctactgtcaaaaaaatatgcatgtatagtaattaggacttcattcctccatgttttcttcccttatcttactgtcattgtcctaaaaccttattttagaaaattgatcaagtaacatgttgcatgtggcttactctggatatatctaagcccttctgcacatctaaacttagatggagttggtcaaatgagggaacatctgggttatgccttttttaaagtagttctctttaggaactgtcagcatgttgttgttgaagtgtggagttgtaactctgcgtggactatggacagcacacaatatgtacttaaaagttgcactattgcaaaacgggtgtattacccaggtactcgtacactatttttttgtactgctggtcctgtaccagaaacattttcctttattgttacttgctttttaaactttgtttagccacttaaaatctgcttatggcacaatttgccttaaaatccattccaagttgtatatttgttttccaataaaaaaattacaatttaaaaaaaaaaaaa

SEQ ID NO: 229 - DNA, 2106 bp, Homo sapiens
  misc_feature: Incyte ID No: 1427389CB1
gtggggctgcggccgggatttgtcccctcttcggcttccgtagaggaagtggcgcggaccttcatttggggtttcggttcccccccttccccttccccggggtctgggggtgacattgcaccgcgcccctcgtggggtcgcgttgccaccccacgcggactccccagctggcgcgcccctcccatttgcctgtcctggtcaggcccccaccccccttcccacctgaccagccatgggggctgcggtgtttttcggctgcactttcgtcgcgttcggcccggccttcgcgcttttcttgatcactgtggctggggacccgcttcgcgttatcatcctggtcgcaggggcatttttctggctggtctccctgctcctggcctctgtggtctggttcatcttggtccatgtgaccgaccggtcagatgcccggctccagtacggcctcctgatttttggtgctgctgtctctgtccttctacaggaggtgttccgctttgcctactacaagctgcttaagaaggcagatgaggggttagcatcgctgagtgaggacggaagatcacccatctccatccgccagatggcctatgtttctggtctctccttcggtatcatcagtggtgtcttctctgttatcaatattttggctgatgcacttgggccaggtgtggttgggatccatggagactcaccctattacttcctgacttcagcctttctgacagcagccattatcctgctccataccttttggggagttgtgttctttgatgcctgtgagaggagacggtactgggctttgggcctggtggttgggagtcacctactgacatcgggactgacattcctgaacccctggtatgaggccagcctgctgcccatctatgcagtcactgtttccatggggctctgggccttcatcacagctggagggtccctccgaagtattcagcgcagcctcttgtgtaaggactgactacctggactgatcgcctgacagatcccacctgcctgtccactgcccatgactgagcccagccccagcccgggtccattgcccacattctctgtctccttctcgtcggtctaccccactacctccagggttttgctttgtccttttgtgaccgttagtctctaagctttaccaggagcagcctgggttcagccagtcagtgactggtgggtttgaatctgcacttatccccaccacctggggacccccttgttgtgtccaggactccccctgtgtcagtgctctgctctcaccctgcccaagactcacctcccttcccctctgcaggccgacggcaggaggacagtcgggtgatggtgtattctgccctgcgcatcccacccgaggactgagggaacctaggggggacccctgggcctggggtgccctcctgatgtcctcgccctgtatttctccatctccagttctggacagtgcaggttgccaagaaaagggacctagtttagccattgccctggagatgaaattaatggaggctcaaggatagatgagctctgagtttctcagtactccctcaagactggacatcttggtctttttctcaggcctgagggggaaccatttttggtgtgataaataccctaaactgcctttttttcttttttgaggtggggggagggaggaggtatattggaactcttctaacctccttgggctatattttctctcctcgagttgctcctcatggctgggctcatttcggtccctttctccttggtcccagaccttgggggaaaggaaggaagtgcatgtttgggaactggcattactggaactaatggttttaacctccttaaccaccagcatccctcctctccccaaggtgaagtggagggtgctgtggtgagctggccactccagagctgcagtgccactggaggagtcagactaccatgacatcgtagggaaggaggggagatttttttgtagtttttaattggggtgtgggaggggcggggaggttttctataaactgtatcattttctgctgagggtggagtgtcccatccttttaatcaaggtgattgtgattttgactaataaaaaagaatttgtaaaaaaaaaaaaaa

SEQ ID NO: 230 - DNA, 286 bp, Homo sapiens
  misc_feature: Incyte ID No: 064173.1
ctgttacctttgagtttttatctccacatacttatattaaaccgtgtagttcttcttcccatctgacatctacaatctcttcactgggtctgtactccatagctattttaccactttctgaaataaagttagcaaggatgaattcagaatctttttcattccaaaacttcctgcatataatggtagcaacccacaatgagacattcttttagtttctaaaagcaggaaataagcattttcctgaaagtttcctcatctcttcatcatacacttcgatttttgtttt

SEQ ID NO: 231 - DNA, 940 bp, Homo sapiens
  misc_feature: Incyte ID No: 1398165.1
accccatgcatctctgtcctgcccgtcagtgctgggacggacagcaagggcaagcccagtgtctggcggataggtgggtgggaacagagaggggagaatgccgtcctaagcttctgcttggggatcccccacacgacctgggtactgcctgggaaacctgtcctaagtaaaactatggacctcgcctcgcccaccggcctgcaaagccagcatctccgtgaaggtggatggaagcgcctttgtcctcattttgagctgcaagctgggtcagcggctctgaagccctcgagtgactttctaacccaagacccagcccctggcaggaggaggggtgggtgcagggctggtgggacaaaaagaggcctcagcaggcctggaagacccttccagtacatcccacagcgtgtcgagcagctgggagaacctgtgtcaagctcgagccgtcataggtccccatgaggtgtctgaagccccttcttggtgatgggaggcagaggtgctgacgttctggagcatggacgtgagtcctcagctggctccgcgtgggcccttggagggtgccaggtgtgtggtgaccttctggatgcctttaacttcatggctgcgtcattcctgatttagaactttaaccggagcttcatctagtgattgcaaaactggaccaatgggaggacggcggcgcagcccgctccctccgtggaatggagctcagctcttcggaggcatcaaagcacctgtcgcctccgtggtccccctgccgagggagtgcggcctctgcaaggttcgggggtggcttcgtttgcctggagtggccggccctgcttgtgccatgtggatgtttgtgagcctcggtcctacagcactgtgtaggctgcatctgtttcgtgctggtcctgttgacttgtatgatatccacaaataaatattttcatggcggtaa

SEQ ID NO: 232 - DNA, 1367 bp, Homo sapiens
  misc_feature: Incyte ID No: 1383160.17
ccttcacgtagggaaaccacatgggactgatagctttctcaagggatctccaagcatctctgaatttggggatttcatcagttactcctggaatcaaaatgagtgtggagtcataatatatattttttttgagacaaagtctcactctagcctgggcaacagagtaagacaaaaaaatatgtatatattgaaaatcaaaggaggcaaaattttgacagggaaggaagtaactgcaaaacactaggctttagtaggtacttatataaaatctagtccagttctctcatttaaaaaaaatgaagacactgaagtacagacttaaatagctcagatagctaattaggaaatttcaagttggccaataatagcattctctctgacatttaaaaataatttctattcaaaatacatgcataattgattttacacctcattactggtggataatttatgtgatgtggattgctggtgtccagcatgacccataaacaggtcagaagaatgatggaatgttttagaataaactcctgcttatagtatactacacagttcaaaagatgtttaaaatgcttttgtatttactgccatgtaattgaaatatatagattattgtaacctttcaacctgaaaatcaagcagtatgagagtttagttatttgtatgtgtcactagtgtctaatgaagcttttaaaatctacaatttcttctttaaaaatatttattaatgtgaatggaatataacaattcagcttaattccccaaccttattctgtgtgtagacattgtattccacaattttgaatggctgtgttttacctctaaataaatgaattcagagaaagtgtgtagtgtactgattatttagcagcttaactttaggtggccataataacatttagacctttcttcctatgtgaaaaaggacctggcactagaaagtaactgcctgttttctgtaatgataattaaattgcttaggagattgttaccctttggttgtctgtaagtgaccccagaagtaggatctcaaaggtaaagaggcattcttcccctaaagagtcttcagtatatggatcagtttagtttggagaatattaatatattttcagtggatattctacatctactatgtcttccagctattttttctggttgccagttttgatgcttgtcttcttccacagatacttcagatagtataaaaatttcccttactaaaaaagaatgtacttttactgataaaatactccaactcatgttagttaccaagctttagtatatttattccataattcttgtgaagtggtctttctccaacattatcagcagcacaatgcccataaaagtattgactgtttatcccagat

SEQ ID NO: 233 - DNA, 897 bp, Homo sapiens
  misc_feature: Incyte ID No: 286187.3
acatctcacataatcaaaaaccaagagaatttgttgctggcagacctgacttgctggaaatacaaaaggaagttcttcagcctgaaagcaagtgaccacagacagtaatctgaatctacacacatgcagaaaaagagcacaggcaaaaataattatgtaattatcagaaacaatctatgcatttttcttttttctcttaactaatgtaaaacacagttgtataaaacaatatgtatatagttgcatcgtttggcctataacgtataaaatataatatatttgccgataacaggttgaagaagctgagtggaagcaaaactgtcttgtactaaagaactgactccagatggtaagacaaatccacaggaacaaatggagagaacgtgaaataggaaataagtttaatataaaaaaactataaacatatacttactcttctctcagcttcttttaaagatgtaaaattatattaagtaattataataatgtgtgttgggtttgtaatgtataggaataacatatataacaataataccacaaagcgggggatgggtttatataggaatagggttgttacattggaattaagttagtgtttatctgaagcctattctgtttagttaagatgtgtatggtaagccctagagcaaccactgaggaaataacttttaaaaaatcaaaaatattattaaatgtaaatatcacattatgaaataatgcaaaagaaggaatggagaagcaaaaagcttgaggcatatcaaaaacaataaaatggcagtcataagtcttcctatatcaaaataacaatgtgcatggattaagcaatactataaaaggcagagatgtcagaaacaagtctgattccacttcatgccatctatttgagacacactttag

SEQ ID NO: 234 - DNA, 1960 bp, Homo sapiens
  misc_feature: Incyte ID No: 995526.5
gagctgcaggggtggttggctgaggctggcttctgcgtggtgcagctgcgcaccgtgtttcagccggcagcgctttaagatttccggggatggaatccgaaatggaaacgcagagcgccggggcagaggagggctttacccaggtcacccgcaagggtggccgacgggcgaagaaacgacaggctgaacagctgtccgcagcaggagagggcggggatgcgggccgcatggacacagaggaggccaggccggcgaagaggcccgtcttcccacccctctgtggggacgggctcctgagtgggaaagaagaaacaaggaaaattccagtcccagctaacagatacacaccattgaaagaaaactggatgaagatatttactcctattgtggaacatttgggacttcagatacgctttaacttgaaatcaaggaatgtagaaatcaggacttgtaaagaaaccaaggatgttagtgctctgacaaaagcagctgattttgtgaaagcttttattctcggctttcaggtggaggatgcacttgccctcatcaggttggatgacctcttcctagagtcttttgaaattacagatgttaaacccctaaagggagaccatctatccagggcaataggaagaatcgctggcaaaggaggaaaaaccaaattcaccatagagaatgtgacacggacaaggatagttttggctgatgtgaaagttcacatccttggctccttccaaaatatcaagatggcaagaactgccatttgcaacctaatcttgggaaatcctccttccaaggtttatggcaatattcgagctgtggctagcagatcagcagatcgattctgatttcaagtcagagactttttatcttgcctttggactctggtgaaaaatactttacagtggtcggtcacaagaaaccatctgaacaatttcagtcatttgaagcctccgtcccttcttccattctcagccagaagcataaacagaaaagaaagatttaagaggattcacactcaacaggttttaggataatttaaatatcaaaaattgattgttatacttaacacattaggtataatttatcatttatctgaaatcacatgtagcagattgcatagtctgtaatcctctcagagggaaacttcttgtttaaacagctctatatggatttatacttttatatttataaatttataacttcatacaaatttataaacatttctttataaattgtaatttaatagattatctcagaaaaacctctctgaatgatgacccttccttaatactgggtgatgtgtgaatatttgtttgttggcagacagggtctcactttgtcacccaggctagagtgcagtggtgcaatctcagctcactgcagcctctgcctcctgagttcaagtgatcctcctgcttcagcctccctagtagctgggactacaggtatgcaccaccaagcctggctaattttttgtattttttgtagagatggggtttcgccatgttgacccggctggtcttgaactcctggcctcaagggatccgtccgcctcagcctccccaagtgctgggattacaggcataagcccctgcgcctggccttgatgtgtgaatatttgagaggtcataagcagtggttttggccataccgtattataccatatacatcagtaagagctcatcttggaacctgttttgcagtttcttgcagtttcaaaaattaaagacctacatcacagggttaatgtgaagaaagctttatttttcaaatgagtatttaatgaaagtatacataaccaatgttgggtatacagatgcttctcaacttatgatgggtttaggtccagataagcccactgtgagttgaaaataccaaaagtcaaacatcatagcttagcctaccttaaaagggctccgaacactacattagcctacagttgggcaaaatcgtctaa

SEQ ID NO: 235 - DNA, 2837 bp, Homo sapiens
  misc_feature: Incyte ID No: 221823.10
cagaggggagcagaggcccgagcggacgcgaggcgacgcggagagggcggcctgggccgaagtgaggcgacgcggggcggcggagtctgagggccggagcggagcggaggcgacgcggggaggggcgagggatcgcggccggtggctgggggccacctgctccccgagcaccggcccccgctccggggagcagagtccggagcgggatccgcggcccacaggttgcgaggggcggtgttgaagaatgtgtgggcgaacatcctgtcacttacctagagatgttctcacgagagcttgcgcctaccaggatcggcggggccagcagcggctcccggagtggagggaccctgataagtactgcccctcttacaacaagagtcctcaatccaacagcccagtgcttctgtctcgactgcactttgagaaggatgcagactcatctgagcgtatcattgctcccatgcgctggggcttggtcccttcttggttcaaagaaagtgatccttccaagctgcagttcaatactaccaactgtcgtagtgataccgtaatggagaaacggtcatttaaggtgcctctgggaaagggaagacgctgtgtcgttttagcagatggattctatgagtggcagcgatgtcagggaacaaaccagaggcagccatacttcatctattttcctcaaatcaagacagagaagtcaggtagcattggtgctgcagatagtcctgagaactgggagaaagtctgggacaactggaggctgctgacaatggccgggatctttgactgctgggagcccccagagggaggagatgtcctgtattcctataccatcatcacagtggattcctgcaaaggcttgagtgacatccaccacaggatgcctgccatattagatggagaggaggcagtttctaaatggcttgactttggtgaagtctcaactcaggaagctctgaaattaatccacccaacagagaacatcaccttccatgcagtctcttctgtggtgaacaactcgcgaaacaacactcctgagtgtctggctcctgtcgacttggtggtcaaaaaggagctcagggcaagtggcagtagccagaggatgttgcagtggttggccacaaagtcacccaaaaaggaagactcaaaaacacctcaaaaggaagagtcagatgttccccagtggtccagtcagttcctgcagaagagtccactccccaccaagagaggcactgcaggactcctagagcaatggctgaagcgggagaaggaggaggaacctgtggccaagcgtccttacagccagtgacacaggactttcagagaccaaggccagggtctgctgcactgctgttctgataataggttcttaacattgtatgtatatgtgtttgctttgggaggaggtggcactgtgttagttgacagttgtgggctcatgtagtcttttttgccatgagtaggagcccctagtggggctggtggacagctttggaagaggtgtcctgctgctgttaccagccatgtgggccccataggggcactgcgcctgctgccctttcctggcagggctggtggagtcttccctcaaagcatgccttacccagctgggaagtctctgccctgatctggtactccttgtagtaagctgttttctgctcagccactgggctctttcacttttttagttcttaaaaatttatttttaagttctaaaataaaataaaaataagttcttaaaatttatttttttcctgaataaattgtatttggtaaacttctgcctacattttggaaagtgatgctggtggggaaagttctagatcttacttggtttcttctagaatcagtcttcaggaatggattttgtcacaaatggggcatgggggctttctgaggaaataactacaagtcttggtggtgggctccttattatgtttctttttctttcattcttgatacttggaagtcgtctgaatcctttagcttcaaaccagcctgagtttgagtgcttgccgtagcagaaactatccttaccacaggtgggaaggaaaggaccagtttctagcagtgtcgggccactcctctttcgaacatccctaagggaggcattcacaaaagctgtcccaagcagctggaagaaaacagcttccgagatgaccaggaggactgggcggcgccgagcccagaacgctcctggcgcagcaccgttggcgttggccgattgctgctggtggggggcgggggtgcaggccccagtctctatgcaaatcagggatcagaagatcggaatttccaccaatcagcgggaagcctcggccctgtaactgctaatgggagacagcagcgccacgccacaggcttttcccctggtttcgggaggggtggggagccaggtggggctcccgcccagaccctttcccgaggtccgccctctccgccttttctctaaattcctcttttgagtgccctcccttccggttgagaggcgggggttggcccgtagttgtacactcagtcaccctgcactgtggaggcgggggcctcccttgtggactgatttgcgtgggatttggttgttttattaagagatttaaaaaattcagatgacttactagtatgactgttttgtcatatttgcttccaggttaataaatgacaaaaatgaaattccctttgtttttcattatcatctccccactgtttctcatggttgcaaattagtttggtgaggtctttcattttaacatgaaagaatataatgcctgcaggggcttgtttccttttcattcaagtttttatactttcatataaacgtgatgttagaagcaaatcct

SEQ ID NO: 236 - DNA, 1219 bp, Homo sapiens
  misc_feature: Incyte ID No: 200963.26
cggaagatcacccatctccatccgccagatggcctatgtttctggtctctccttcggtatcatcagtggtgtcttctctgttatcaatattttggctgatgcacttgggccaggtgtggttgggatccatggagactcaccctattacttcctgacttcagcctttctgacagcagccattatcctgctccataccttttggggagttgtgttctttgatgcctgtgagaggagacggtactgggctttgggcctggtggttgggagtcacctactgacatcgggactgacattcctgaacccctggtatgaggccagcctgctgcccatctatgcagtcactgtttccatggggctctgggccttcatcacagctggagggtccctccgaagtattcagcgcagcctcttgtgccgacggcaggaggacagtcgggtgatggtgtattctgccctgcgcatcccacccgaggactgagggaacctaggggggacccctgggcctggggtgccctcctgatgtcctcgccctgtatttctccatctccagttctggacagtgcaggttgccaagaaaagggacctagtttagccattgccctggagatgaaattaatggaggctcaaggatagatgagctctgagtttctcagtactccctcaagactggacatcttggtctttttctcaggcctgagggggaaccatttttggtgtgataaataccctaaactgccttttttttcttttttgaggtggggggagggaggaggtatattggaactcttctaacctccttgggctatattttctctcctcgagttgctcctcatggctgggctcatttcggtccctttctccttggtcccagaccttgggggaaaggaaggaagtgcatgtttgggaactggcattactggaactaatggttttaacctccttaaccaccagcatccctcctctccccaaggtgaagtggagggtgctgtggtgagctggccactccagagctgcagtgccactggaggagtcagactaccatgacatcgtagggaaggaggggagatttttttgtagtttttaattggggtgtgggaggggcggggaggttttctataaactgtatcattttctgctgagggtggagtgtcccatccttttaatcaaggtgattgtgattttgactaataaaaaagaatttgcaaaaaaaaaaaaaagg

SEQ ID NO: 237 - DNA, 444 bp, Homo sapiens
  misc_feature: Incyte ID No: 967891.2
ttagctgaggaggtcaatttaaatggttctggcaaactgctcaagggtggtatttccaacattttggaggaactggttgtccagcctctgttggtatcagtcagtgctctgactcttgcaactgaaactgttcggagcattctgaaaatagatgatgtggtaaacactcgataatctggataactgactagcaccattatgatcaccagtattgtggctggaatggaagaagatcaccttggtgttccttgtttggaagattatttcctctgaatttctgggcttggtcttccagttggcatttgcctgaagttgtattgaaacaatttaatgaaaatattaaatatttggtttcaaaaggcagatttatcttctcccaacattctgttatttctgatacttttgaaaaactaataaaaactaataaaagaagcgtaaaaaaaa

SEQ ID NO: 238 - DNA, 463 bp, Homo sapiens
  misc_feature: Incyte ID No: 990840.18
gctcgaggtattattcccgacgacacatataaataaggtatattctcatatgtatatgtgtcgtcgggaataatactggtaggtatgtcaagcatgaagagattctaccagtattattcccgacgacacatatacatatgagaatataccttatttatttttgtgtaggtgtctgccttcacaaatgtcattgtctactcctagaagaaccaaatacctcaatttttgtttttgagtactgtactatcctgtaaatatatcttaagcaggtttgttttcagcactgatggaaaataccagtgttgggtttttttttagttgccaacagttgtatgtttgctgattatttatgacctgaaataatatatttcttcttctaagaagacattttgttacataaggatgacttttttatacaatggaataaattatggcatttctattgaaaaaaaaaccaccgtcc

SEQ ID NO: 239 - DNA, 6057 bp, Homo sapiens
  misc_feature: Incyte ID No: 3286001CB1
tccccggagaggatcctgctgagcccagcctcccccctccccttctcctcctctcccttggagagcccgggcagccactgccccgcagccccagtgacaggaggagaccataacccccgacagcgccatggcccagattctgccaattcgttttcaggagcatctccagctccagaacctgggtatcaacccagcaaacattggcttcagtaccctgactatggagtctgacaaattcatctgcattagagaaaaagtaggagagcaggcccaggtggtaatcattgatatgaatgacccaagtaatccaattcgaagaccaatttcagcagacagcgccatcatgaatccagctagcaaagtaattgcactgaaagctgggaaaactcttcagatttttaacattgaaatgaaaagtaaaatgaaggctcataccatgactgatgatgtcaccttttggaaatggatctctttgaatacggttgctcttgttacggataatgcagtttatcactggagtatggaaggagagtctcagccagtgaaaatgtttgatcgccattctagccttgcagggtgccagattatcaattaccgtacagatgcaaaacaaaagtggttacttctgactggtatatctgcacagcaaaatcgtgtggtgggagctatgcagctatattctgtagataggaaagtgtctcagcccattgaaggacatgcagctagctttgcacagtttaagatggaaggaaatgcagaagaatcaacgttattttgttttgcagttcggggccaagctggagggaagttacatattattgaagttggcacaccacctacagggaaccagccctttccaaagaaggcagtggatgtcttctttcctccagaagcacaaaatgattttcctgttgcaatgcagatcagtgaaaagcatgatgtggtgttcttgataaccaagtatggttatatccacctctatgatcttgagactggtacctgcatctacatgaatagaatcagtggagaaacaatttttgttactgcacctcatgaagccacagctggaataattggagtaaacagaaagggacaagttctgtcagtgtgtgtggaagaagaaaacataattccttacatcaccaatgttctacaaaatcctgatttggctctgagaatggctgtacgtaataacttagccggtgctgaagaactctttgcccggaaatttaatgctctttttgcccagggaaattactcggaggcagcaaaggtggctgctaatgcaccaaagggaattcttcgtactccagacactatccgtcggttccagagtgtcccagcccagccaggtcaaacttctcctctacttcagtactttggtatccttttggaccagggacagctcaacaaatacgaatccttagagctttgtaggcctgtacttcagcaagggcgaaaacagcttttggagaaatggttaaaagaagataagctggaatgttctgaagaactgggtgatcttgtgaaatctgtggaccctacattggcacttagtgtgtacctaagggctaacgtcccaaataaagtcattcagtgctttgcagaaacaggtcaagtccaaaagattgttttatatgctaaaaaagttggatacactccagattggatatttctgctgagaaatgtaatgcgaatcagtccagatcagggacagcagtttgcccaaatgttagttcaagatgaagagcctcttgctgacatcacacagattgtagatgtctttatggaatacaatctaattcagcagtgtactgcattcttgcttgatgctctgaagaataatcgcccatctgaaggtcctttacagacgcggttacttgagatgaaccttatgcatgcgcctcaagttgcagatgctattctaggcaatcagatgttcacacattatgaccgggctcatattgctcaactgtgtgaaaaggctggcctactgcagcgtgcattagaacatttcactgatttatatgatataaaacgtgcagtggttcacacccatcttcttaaccctgagtggttagtcaactactttggttccttatcagtagaagactccctagaatgtctcagagccatgctgtctgccaacatccgtcagaatctgcagatttgtgttcaggtggcttctaaatatcatgaacaactgtcaactcagtctctgattgaactttttgaatctttcaagagttttgaaggtctcttttattttctgggatccattgttaactttagccaggacccagatgtgcactttaaatatattcaggcagcttgcaagactgggcaaatcaaagaagtagaaagaatctgtagagaaagcaactgctacgatcctgagcgagtcaagaattttcttaaggaagcaaaactaacagatcagctaccacttatcattgtgtgtgatcgatttgactttgtccatgatttggtgctctatttatatagaaataatcttcaaaagtatatagagatatatgtacagaaggtgaatccaagtcgacttcctgtagttattggaggattacttgatgttgactgttctgaagatgtcataaaaaacttgattcttgttgtaagaggtcaattctctactgatgagcttgttgctgaggttgaaaaaagaaacagattgaaactgcttctgccttggctagaggccagaattcatgagggctgtgaggagcctgctactcacaatgccttagccaaaatctacatagacagtaataacaacccggagagatttcttcgtgaaaatccctactatgacagtcgcgttgttggaaagtattgtgagaagagagatccacatctggcctgtgttgcttatgaacgtggccaatgtgatctggaacttattaatgtttgcaatgagaattccctcttcaaaagtctttctcgctacctggtacgtcgaaaggatccagaattgtggggcagcgtgctgctggaaagcaatccttacaggagacccctaattgaccaggttgtacaaacagctttgtctgagactcaggaccctgaagaagtgtcagtaactgtaaaggctttcatgactgcagaccttcctaatgaactcattgaactgctggagaaaattgtccttgataactctgtattcagtgaacacaggaatctgcaaaacctccttatcctcactgcaattaaggctgaccgtacacgtgttatggagtatattaaccgcctggataattatgatgccccagatattgccaatatcgccatcagcaatgagctgtttgaagaagcatttgccattttccggaaatttgatgtcaatacttcagcagttcaggtcttaattgagcatattggaaacttggatcgggcatatgagtttgctgaacgttgcaatgaacctgcggtctggagtcaacttgcaaaagcccagttgcagaaaggaatggtgaaagaagccattgattcttatatcaaagcagatgatccttcctcctacatggaagttgttcaggctgccaatactagtggaaactgggaagaactggtgaagtacttgcagatggcccgtaagaaggctcgagagtcctatgtggagacagaactgatattcgcactggctaaaacaaaccgccttgcagagttagaagaatttatcaatggaccaaataatgctcatatccaacaagttggtgaccgttgttatgatgaaaaaatgtatgatgctgctaagttgttgtacaataatgtttccaattttggacgtttggcatctaccctggttcacctgggtgaatatcaggcagctgttgatggggctaggaaagctaacagtactcgaacatggaaagaggtctgcttcgcctgtgtagatgggaaagaattccgtcttgctcagatgtgtggacttcatattgttgtacatgcagatgaattagaagaacttatcaactactatcaggatcgtggctattttgaagagctgatcaccatgttggaagcagcactgggacttgagcgagctcacatgggaatgtttactgaattagctattctatactctaaatttaagcctcagaaaatgagggagcacctggagctgttctggtctagagtgaatattcccaaggtgctaagagctgcagaacaagctcatctttgggcagaactggtgtttttgtatgacaagtatgaagaatatgataatgccataattaccatgatgaatcatccaactgatgcctggaaagaagggcaattcaaagatatcattaccaaggttgccaatgtggaactatactacagagcaatacagttctacttagaattcaagcctctgttgttaaatgatttgctgatggtgctgtctccacggttggatcacactcgtgcagtcaattatttcagcaaggttaaacagctaccactggtgaaaccgtatttgcgttcagttcagaaccataacaacaaatctgtgaatgaatcattgaacaatctttttattacagaagaagattatcaggctctgcgaacatcaatagatgcttatgacaactttgacaatatctcgcttgctcagcgtttggaaaaacatgaactcattgagttcaggagaattgctgcttatctcttcaaaggcaacaatcgctggaaacagagtgtagagctgtgcaagaaagacagcctttacaaggatgcaatgcagtatgcttctgaatctaaagatactgaattggctgaagaactcctgcagtggtttttgcaggaagaaaaaagagagtgctttggagcttgtctgtttacctgttacgatcttttaaggccagatgtcgtcctagaaactgcatggaggcacaatatcatggattttgccatgccctatttcatccaggtcatgaaggagtacttgacaaaggtggataaattagatgcttcagaatcactgagaaaagaagaagaacaagctacagagacacaacccattgtttatggtcagccccagttgatgctgacagcaggacccagtgttgccgtccctccccaggcaccttttggttatggttataccgcaccaccgtatggacagccacagcctggctttgggtacagcatgtgagatgaagcgctgatcctgtagtcacctattttcgtactgaaacatcgtctttacccacttctcagtttataatgggggaaaacaggcaacgtgttcttgtaacctttatttcatgaaggacttctttttgtttctaactataaacttggatcacctatgttaaaaccttatttcacattccacatcattttagaatttattttcgaaggggaatagtttcaatgttttattcacttgggctttttttcttccccctctttctttaaagaactgctcaatattcaatctgttgtgaagaacctgatttgcactctgtagtgtttaaagaaacaaagaaactctaatattgaatctcttaaatttagtgtatgtaaacagcttacaaatacgtattgtctaaatgcatttaaatctgttttattcaaagaaaagctaaagcaaaaacactggcatatgaccatgcaagactgtcagtgccaacaaagacaacactaatcagcacatcgtacactggattgcagtgcttcccagattattgaaaaatgttacagacaacttgcctgatttttaaatgagcgtaaaaggccctctaacctatgcaggtttccccattatgcatatagaaaatgctagtatgttttgctcacttcatatgtaacaggtgcccttatgttgtgctgtatcctgtgctttttctgtgggaccattccattcaggagcaaagagcaccatgattccaatcttgtgtgtgtttactaacccttccctgaggtttgtgtatgttggatattgtggtgttttagatcactgagtgtacagaagagagaaattcaaacaaaatattgctgttcttcagttttgtttgtggaatttgaaattactcaaatttaaaataaattact

SEQ ID NO: 240 - DNA, 3433 bp, Homo sapiens
  misc_feature: Incyte ID No: 255957.9
gagcaacctcagcttctagtatccagactccagcgccgccccgggcgcggaccccaaccccgacccagagcttctccagcggcggcgcagcgagcagggctccccgccttaacttcctccgcggggcccagccaccttcgggagtccgggttgcccacctgcaaactctccgccttctgcacctgccacccctgagccagcgcgggcgcccgagcgagtcatggccaacgcggggctgcagctgttgggcttcattctcgccttcctgggatggatcggcgccatcgtcagcactgccctgccccagtggaggatttactcctatgccggcgacaacatcgtgaccgcccaggccatgtacgaggggctgtggatgtcctgcgtgtcgcagagcaccgggcagatccagtgcaaagtctttgactccttgctgaatctgagcagcacattgcaagcaacccgtgccttgatggtggttggcatcctcctgggagtgatagcaatctttgtggccaccgttggcatgaagtgtatgaagtgcttggaagacgatgaggtgcagaagatgaggatggctgtcattgggggtgcgatatttcttcttgcaggtctggctattttagttgccacagcatggtatggcaatagaatcgttcaagaattctatgaccctatgaccccagtcaatgccaggtacgaatttggtcaggctctcttcactggctgggctgctgcttctctctgccttctgggaggtgccctactttgctgttcctgtccccgaaaaaacaaaccttcttcccaacaccaaggccctatccaaaacctgcaccttccagcgggaaagactacgtgtgacacagaggcaaaaggagaaaatcatgttgaaacaaaccgaaaatggacattgagatactatcattaacattaggaccttagaattttgggtattgtaatctaaagtatggtattacaaaacaaacatacaaacaaaaaacccatgtgttaaaatactcagtgctaaacatggcttaatcttattttatcttctttcctcaatataggagggaagatttttccatttgtattactgcttcccattgagtaatcatactcaaatgggggaaggggtgctccttaaatatatatagatatgtatatatacatgtttttctattaaaaatagacagtaaaatactattctcattatgttgatactagcatacttaaaatatctctaaaataggtaaatgtatttaattccatatgatgaagatgtttattggtatattttctttttcgtccttatatacatatgtaacagtcaaatatcatttactcttcttcattagctttgggtgcctttgccacaagacctagcctaatttaccaaggatgaattctttcaattcttcatgcgtgcccttttcatatacttattttattttttaccataatcttatagcacttgcatcgttattaagcccttatttgttttgtgtttcattggtctctatctcctgaatctaacacatttcatagcctacattttagtttctaaagccaagaagaatttattacaaatcagaactttggaggcaaatctttctgcatgaccaaagtgataaattcctgttgaccttcccacacaatccctgtactctgacccatagcactcttgtttgctttgaaaatatttgtccaattgagtagctgcatgctgttcccccaggtgttgtaacacaactttattgattgaatttttaagctacttattcatagttttatatccccctaaactacctttttgttccccattccttaattgtattgttttcccaagtgtaattatcatgcgttttatatcttcctaataaggtgtggtctgtttgtctgaacaaagtgctagactttctggagtgataatctggtgacaaatattctctctgtagctgtaagcaagtcacttaatctttctacctcttttttctatctgccaaattgagataatgatacttaaccagttagaagaggtagtgtgaatattaattagtttatattactctcattctttgaacatgaactatgcctatgtagtgtctttatttgctcagctggctgagacactgaagaagtcactgaacaaaacctacacacgtaccttcatgtgattcactgccttcctctctctaccagtctatttccactgaacaaaacctacacacataccttcatgtggttcagtgccttcctctctctaccagtctatttccactgaacaaaacctacgcacataccttcatgtggctcagtgccttcctctctctaccagtctatttccattctttcagctgtgtctgacatgtttgtgctctgttccattttaacaactgctcttacttttccagtctgtacagaatgctatttcacttgagcaagatgatgtatggaaagggtgttggcactggtgtctggagacctggatttgagtcttggtgctatcaatcaccgtctgtgtttgagcaaggcatttggctgctgtaagcttattgcttcatctgtaagcggtggtttgtaattcctgatcttcccacctcacagtgatgttgtggggatccagtgagatagaatacatgtaagtgtggttttgtaatttaaaaagtgctatactaagggaaagaattgaggaattaactgcatacgttttggtgttgcttttcaaatgtttgaaaataaaaaaaatgttaagaaatgggtttcttgccttaaccagtctctcaagtgatgagacagtgaagtaaaattgagtgcactaaacgaataagattctgaggaagtcttatcttctgcagtgagtatggcccaatgctttctgtggctaaacagatgtaatgggaagaaataaaagcctacgtgttggtaaatccaacagcaagggagatttttgaatcataataactcataaggtgctatctgttcagtgatgccctcagagctcttgctgttagctggcagctgacgctgctaggatagttagtttggaaatggtacttcataataaactacacaaggaaagtcagccaccgtgtcttatgaggaattggacctaataaattttagtgtgccttccaaacctgagaatatatgcttttggaagttaaaatttaaatggcttttgccacatacatagatcttcatgatgtgtgagtgtaattccatgtggatatcagttaccaaacattacaaaaaaattttatggcccaaaatgaccaacgaaattgttacaatagaatttatccaattttgatctttttatattcttctaccacacctggaaacagaccaatagacattttggggttttataatgggaatttgtataaagcattactctttttcaataaattgttttttaatttaaaaaaaggaaaaa

SEQ ID NO: 241 - DNA, 3141 bp, Homo sapiens
  misc_feature: Incyte ID No: 2814373CB1
ctccagtgtcaatcaacttctttttcctcctcttcctcatttaaataagtttaaagctcctcctccccccggcccaccaaatctgaactttataaattgggctttgcgcgccccagcccggagtcagaaaggcgaggggcgccgggaactggcgtgtgggactccagacaggagaggctgcgccttccccgcaccgggaccttcgcgacacaccagatcctcgcccctggctcgcgcgaacgcacaggatgaccaccaccctcgtgtctgccaccatcttcgacttgagcgaagttttatgcaagggtaacaagatgctcaactatagtgctcccagtgcagggggttgcctgctggacagaaaggcagtgggcacccctgctggtgggggcttccctcggaggcactcagtcaccctgcccagctccaagttccaccagaaccagctcctcagcagcctcaagggtgagccagcccccgctctgagctcgcgagacagccgcttccgagaccgctccttctcggaagggggcgagcggctgctgcccacccagaagcagcccgggggcggccaggtcaactccagccgctacaagacggagctgtgccgcccctttgaggaaaacggtgcctgtaagtacggggacaagtgccagttcgcacacggcatccacgagctccgcagcctgacccgccaccccaagtacaagacggagctgtgccgcaccttccacaccatcggcttttgcccctacgggccccgctgccacttcatccacaacgctgaagagcgccgtgccctggccggggcccgggacctctccgctgaccgtccccgcctccagcatagctttagctttgctgggtttcccagtgccgctgccaccgccgctgccaccgggctgctggacagccccacgtccatcaccccaccccctattctgagcgccgatgacctcctgggctcacctaccctgcccgatggcaccaataacccttttgccttctccagccaggagctggcaagcctctttgcccctagcatggggctgcccgggggtggctccccgaccaccttcctcttccggcccatgtccgagtcccctcacatgtttgactctccccccagccctcaggattctctctcggaccaggagggctacctgagcagctccagcagcagccacagtggctcagactccccgaccttggacaactcaagacgcctgcccatcttcagcagactttccatctcagatgactaagccagggtagggagggacctcctgcctactccagcccctaccctgcacccacatcccataccctcttctccctacccatcccattccccacaggccctacattaacaaggttaagctcaacccctttcccccagcacctcagaatgtgccctccctctccccctcataaccccacctaacataaggacaagtcaatttgtcagtagcttcttctggcttgaaaccccctccctggattttatagcccacttaccatgcataacagacaagtcccatattttgtcagtagatgcctttttttttccggcttaagccttaagtgccaaatcacaagagaaaaagcagtaacagtttacagaagcaacttagtgccttgtaatctaactttgtcactgtgactacattacctcttcagcgccagagggcacccgtgggcctcccggagcctctgcccatggcggggtggagacccggaaccagcagccccctccactggcgacacaactgcaccttccctcatttcagtctcccgcacacttattcctcctcccctcttcccggtggcacctctccacctgtacccgcccccgccccaccaccccggccccttggaagagttgttgccagaccagggttttgggggaaacctgtcttgacattcaaaacctttttcttcccgatctgaacccctgttgactaatcttgcctgggtttgtgtaggtctgcaggaaggaaggctgaaaaagcggacgaagattttgacttaagtgggactttgtgatttaattttttcttttttttaagtggggaggaaggggaagctagatggactaggagagacttgattttggtgctaaagttccccagttcatatgtgacatctttttaaaaaaaataacaacaaaaaaaaaatgagagaaaagctaaaaaaaaaaaaaaaaggggtgagcagttaatggtattcattccacatacaatatctgtgtaaaacgatttcctgtagaagtagctttaatggtttttgctctagaataccgtaggtctatccttagagcactcacgccatgctttcttccctgggttttaaacttcatataactttcagaaattggagagcaaaaattttgcttgtcactgcacatcaatataaaaaagcttatttaacttatcaaaacgtatttattgccaaactatgcttttttttgttaattttgttcatatttatcgggatgacaaatccatagaatatattcttttatgttaaattatgatcttcatattaatcttaaaattttgtgacgtgtctttttcctttttttccacagttttaatatattattcttcaacgacattttttgtaactttacacttttttggttattttattttaaaaaaatgaaaaattaatttaaaaaaatgcaaaaaactgttggattatttattttagaaattcccccctttgtgttggactgcaaattgagtttctttctctttaggcctttcacaactaggactgagaatgtatgtaaaagttctgtgacagtacagaaggaaaacaactttttatgtatagcttctaaaaggggaaaaaaaaaaaaagagaaaccctttgacttccacgtgcccatctcaagacattccactcacagatttgaggttctggattccaggtctggagttttccaatgttaatgtaaacagaactggcacacacacattaagatgaatgtaattattattcctcttgctggtcactaccgtcgctttctatttctctttctttgtgtgaatttatttaaaagaaaaaaaaactttttgtaacgactatttgcagtttaaaaatcaataaaccccgttttttcaagaaaaaaaaaaa

SEQ ID NO: 242 - DNA, 4285 bp, Homo sapiens
  misc_feature: Incyte ID No: 2542412CB1
ggtgtgtcggggctcggattaagacatcggagtcggagacctgagagatgttaaccaaattcgagaccaagagcgcgcgggtcaaagggctcagctttcaccccaaaagaccttggatcctgactagtttacataatggggtcatccagttatgggactatcggatgtgcactctcattgacaagtttgatgaacatgatggtccagtgcgaggcattgacttccataagcagcagccactgttcgtctctggaggagatgactataagattaaggtttggaattacaatcttcggcgctgtcttttcacattgcttgggcacttagattatattcgcaccacgttttttcatcatgaatatccctggattctgagtgcctccgatgatcagaccatccgagtgtggaactggcaatctagaacctgtgtttgtgtgttaacagggcacaaccattatgtgatgtgtgctcagttccaccccacagaagacttggtagtatcagccagcctggaccagactgtgcgcgtttgggatatttctggtctgaggaaaaaaaacctgtcccctggtgcggtggaatcggatgtgagaggaataactggggttgatctatttggaactacagatgcagtggtgaagcatgtactagagggtcacgatcgtggagtaaactgggctgccttccaccccactatgccccttattgtatctggggcagatgatcgtcaagtgaagatctggcgcatgaatgaatcaaaggcatgggaggttgatacctgccggggccattacaacaatgtatcttgtgccgtcttccaccctcgccaagagttgatcctcagcaattctgaggacaagagtattcgagtctgggatatgtctaagcggactggggttcagactttccgcagagaccatgatcgtttctgggtcctagctgctcaccctaaccttaacctctttgcagcaggccatgatggtggtatgattgtgtttaagctggaacgggaacggccagcctatgctgttcatggcaatatgctacactatgtcaaggaccgattcttacgacagctggatttcaacagctccaaagatgtagctgtgatgcagttgcggagtggttccaagtttccagtattcaatatgtcatacaatccagcagaaaatgcagtcctgctttgtacaagagctagcaatctagagaatagtacctatgacctgtacaccatccctaaagatgctgactcccagaatcctgatgcgcctgaagggaaacgatcctcaggcctgacagccgtttgggtcgctcgaaatcggtttgctgtcctagatcggatgcattcgcttctgatcaagaatctgaagaatgagatcaccaaaaaggtacaggtgcccaactgtgatgagatcttctatgctggcacaggcaatctcctgcttcgagatgcggactctatcacactctttgacgtacagcagaagcggactctggcatctgtgaagatttctaaagtgaaatacgttatctggtcagcagacatgtcacatgtagcactactagccaaacacgccattgtgatctgtaaccgcaaactggatgctttatgtaacattcatgagaacattcgtgtcaagagtggggcctgggatgagagtggggtatttatctataccacaagcaaccacatcaaatatgctgtcaccactggggaccacgggatcattcgaactctggatttacccatctatgtcacacgggtgaagggcaacaatgtatactgcctagacagggagtgtcgtccccgggtactcaccattgatcccactgagttcaaattcaagctggccctgatcaacagaaaatatgatgaggtactgcacatggtgaggaatgccaaactagttggccagtctattattgcttatctccagaagaagggctatcctgaagtggcactgcattttgtcaaggatgagaaaactcgctttagtctggcactggagtgtggaaacattgagattgctctggaagcagccaaagcactggatgacaagaactgctgggaaaagctgggagaagtggccctgctgcaggggaaccaccagattgtggaaatgtgctatcagcgtaccaaaaactttgacaaactttccttcctgtatcttatcactggcaacttagaaaaacttcgcaagatgatgaagattgctgagatcagaaaggacatgagtggccactatcagaatgccctatacctgggtgatgtgtcagagcgtgtgcggatcctgaagaactgtggacagaagtccctggcctatctcacagctgctacccatggcttagatgaagaagctgagagcctaaaggagacatttgacccagagaaggagacaatcccagacattgaccctaatgccaagctgctccagccacctgcacctatcatgccattggataccaattggcctttattgactgtatccaaaggattttttgaaggcaccattgccagcaaagggaagggaggagcactggctgctgacattgacattgacactgttggtacagagggctggggagaggatgcagagctgcagttggatgaagatgggtttgtggaggctacagaaggtttgggggatgatgctcttggcaagggacaggaagaaggaggtggctgggatgtagaagaagatctggagctccctcctgagctggatatatcccctggggcagctggtggggctgaagatggtttctttgtgcccccaaccaagggaacaagtccaactcagatctggtgtaataactctcagcttccagttgatcacatcctggcaggctctttcgaaacagccatgcggctccttcatgaccaagtaggggtaatccagtttggcccctacaagcaactgttcctacagacatacgcccgaggccgcacaacctatcaggctctgccctgcctaccctccatgtatggctatcctaatcgcaactggaaggatgcagggctgaagaatggtgtaccagctgtgggcctgaagcttaatgacctcatccaacggttgcagctgtgctaccagctcaccacagttggcaaatttgaggaggctgtggaaaaattccgttccatccttctcagtgtgccacttcttgttgtggacaataaacaagagattgcagaggcccagcagctcatcaccatttgccgtgagtacattgtgggtttgtccgtggagacagaaaggaagaagctgcccaaagagactctagaacagcagaagcgcatctgtgagatggcagcctatttcacccactcaaacctgcagcctgtgcacatgatcctggtgctgcgtacagccctcaatctgttcttcaagctcaagaacttcaagacagctgccacctttgctcggcgcctactagaactcgggcccaagcctgaggtggcccaacagacccgaaaaatcctgtctgcctgtgagaagaatcccacagatgcctaccagctcaattatgacatgcacaacccctttgacatttgtgctgcatcatatcggcccatctaccgtggaaagccagtagaaaagtgtccactcagtggggcctgctattcccctgagttcaaaggtcaaatctgcagggtcaccacagtgacagagattggcaaagatgtgattggtttaaggatcagtcctctgcagtttcgctaaggccccctttgtgtgcatgggtcagtcaccatatgttccccccagagaatgtgtctatatcctccttctaacagcaccttccccctgcagctactcttcagatctggctctctgtaccctaaaacctagtatctttttctcttctatggaaaatccgaaggtctaaacttgacttttttgaggtcttctcaacttgactacagttgtgctcataattgtccttgcctttccagcttaattattttaaggaacaaatgaaaactctgggctgggtggagtggctcatacctgtaatcccagcactttgggaggctacggtgggcagatcatctgaggccaggagttcgagacctgcctggccaacatggcaacaccccgtctctaataaaaatataaaaattagcctggcatggtagcatgcgcctatagtcccagctgctcaggaggctgaggcatgagaatcgcttgaacctaggaggtggaggttgcattcaactgagatcataccacttcattccagcctgggtgacagagcaagactctgtctcaaaaaaaaaaaaaaa

SEQ ID NO: 243 - DNA, 1632 bp, Homo sapiens
  misc_feature: Incyte ID No: 2693187CB1
ggcagttctcgtccagagcccaggtaatccgggcgggatcagctagcgtcgcgatgtgatgacgtcaggccccggccaggccgggagtggcgtgctgggcgtgcgcggctgcggtacggcgtgttggtcccagcggttcagctgaggtagggacgtgctgtaggccggaatgttaccggctgttggatctgtggatgaggaagaggatcctgcggaggaggattgtcctgaattggttcccattgagacgacgcaaagcgaggaggaggaaaagtctggcctcggcgccaagatcccagtcacaattatcaccgggtatttaggtgctgggaagacaacacttctgaactatattttgacagagcaacatagtaaaagagtagcggtcattttaaatgaatctggggaaggaagtgcgctggagaaatccttagctgtcagccaaggtggagagctctatgaagagtggctggaacttagaaacggttgcctctgctgttcagtgaaggacaatggccttagagctattgagaatttgatgcaaaagaaggggaaatttgatgacatactgttagagaccactggattagcagaccctggtgcagtgacttctatgttttgggttgatgctgaattagggagtgatatttaccttgatggtatcataactattgtggattcaaaatatggattaaaacatttaacagaagagaaacctgatggccttatcaatgaagctactaggcaagttgctttggcagatgccattctcattaataaaacagacctggttccagaagaagatgtaaagaaattaagaacgacaattagatccataaatggactaggacaaatcttagaaacacaaagatcaagtttgcagaaaaaacttcagcatgtgccaggaacacaacctcaccttgatcagagtattgttacaatcacatttgaagtaccaggaaatgcaaaggaagaacatcttaatatgtttattcagaatctcctgtgggaaaagaatgtgagaaacaaggacaatcactgcatggaggtcataaggctgaagggattggtgtcaatcaaagacaaatcacaacaagtgattgtccagggtgtccatgagctctatgatctggaggagactccagtgagctggaaggatgacactgagagaacaaatcgattggtcctccttggcagaaatttagataaggatatccttaaacagctgtttatagctactgtgacagaaacagaaaagcagtggacaacacgtttccaagaagatcaagtttgtacataacactagaggcatttcttatcaaaaggattggataataaaaataagtttctactgggtatatttcaagcatttatttattactttagttacgaattccaatatactttaaaatggtatttgttttacagcatacataagatgtagcaaatcagtactgtacaacatttaacattcatacagttatatataatatccttttttttaaagaatggtatttcacaaaaatatcttttgaaattgggctttggaggtttacataatactgaaccattgaaagtttaataataattggatgataccaactttccaccatttggcctttttttccttag

SEQ ID NO: 244 - DNA, 2159 bp, Homo sapiens
  misc_feature: Incyte ID No: 245334.1
cctagctgggatattggagcagcaagaggctgggaagccatcacttaccttgcactgagaaagaagacaaaggccagtatgcacagctttcctccactgctgctgctgctgttctggggtgtggtgtctcacagcttcccagcgactctagaaacacaagagcaagatgtggacttagtccagaaatacctggaaaaatactacaacctgaagaatgatgggaggcaagttgaaaagcggagaaatagtggcccagtggttgaaaaattgaagcaaatgcaggaattctttgggctgaaagtgactgggaaaccagatgctgaaaccctgaaggtgatgaagcagcccagatgtggagtgcctgatgtggctcagtttgtcctcactgaggggaaccctcgctgggagcaaacacatctgacctacaggattgaaaattacacgccagatttgccaagagcagatgtggaccatgccattgagaaagccttccaactctggagtaatgtcacacctctgacattcaccaaggtctctgagggtcaagcagacatcatgatatcttttgtcaggggagatcatcgggacaactctccttttgatggacctggaggaaatcttgctcatgcttttcaaccaggcccaggtattggaggggatgctcattttgatgaagatgaaaggtggaccaacaatttcagagagtacaacttacatcgtgttgcggctcatgaactcggccattctcttggactctcccattctactgatatcggggctttgatgtaccctagctacaccttcagtggtgatgttcagctagctcaggatgacattgatggcatccaagccatatatggacgttcccaaaatcctgtccagcccatcggcccacaaaccccaaaagcgtgtgacagtaagctaacctttgatgctataactacgattcggggagaagtgatgttctttaaagacagattctacatgcgcacaaatcccttctacccggaagttgagctcaatttcatttctgttttctggccacaactgccaaatgggcttgaagctgcttacgaatttgccgacagagatgaagtccggtttttcaaagggaataagtactgggctgttcagggacagaatgtgctacacggataccccaaggacatctacagctcctttggcttccctagaactgtgaagcatatcgatgctgctctttctgaggaaaacactggaaaaacctacttctttgttgctaacaaatactggaggtatgatgaatataaacgatctatggatccaggttatcccaaaatgatagcacatgactttcctggaattggccacaaagttgatgcagttttcatgaaagatggatttttctatttctttcatggaacaagacaatacaaatttgatcctaaaacgaagagaattttgactctccagaaagctaatagctggttcaactgcaggaaaaattgaacattactaatttgaatggaaaacacatggtgtgagtccaaaggaggtgttttcctgaagaactgtctattttctcagtcatttttaacctctagagtcactgatacacagaatataatcttatttatacctcagtttgcatatttttttactatttagaatgtagccctttttgtactgatataatttagttccacaaatggtgggtacaaaaagtcaagtttgtggcttatggattcatataggccagagttgcaaagatcttttctagagtatgcaactctgacgttgatcccagagagcagcttcagtgacaaacatatcctttcaagacagaaagagacaggagacatgagtctttgccggaggaaaagcagctcaagaacacatgtgcagtcactggtgtcaccctggataggcaagggataactcttctaacacaaaataagtgttttatgtttggaataaagtcaaccttgtttctactgttttaaaaggatatgtttgtcactgaagctgctctctgggatcaacgtcagagttgcatactctagaaaagatctttgcaactcaggcctatatgaatccataagccacaaacttgactttttgtacacacaatttgtggaactaaattatatcagtacaaaaagggctacattctaaatagt

SEQ ID NO: 245 - DNA, 2099 bp, Homo sapiens
  misc_feature: Incyte ID No: 411831CB1
gaacgctggttagtcttgtttcgggttccggctgcgttgggcttgcgtgcggctcgctaagactatggcgtccgggcctcattcgacagctactgctgccgcagccgcctcatcggccgccccaagcgcgggcggctccagctccgggacgacgaccacgacgacgaccacgacgggagggatcctgatcggcgatcgcctgtactcggaagtttcacttaccatcgaccactctctgattccggaggagaggctctcgcccaccccatccatgcaggatgggctcgacctgcccagtgagacggacttacgcatcctgggctgcgagctcatccaggccgccggcattctcctccggctgccgcaggtggcgatggcaacggggcaggtgttgtttcatcgttttttctactccaaatctttcgtcaaacacagtttcgagattgttgctatggcttgtattaatcttgcatcaaaaatcgaagaagcacctagaagaataagagatgtgattaatgtattccaccacctccgccagttaagaggaaaaaggactccaagccccctgatccttgatcagaactacattaacaccaaaaatcaagttatcaaagcagagaggagggtgctaaaggagttgggattttgtgttcatgtcaagcatcctcataagatcattgttatgtatttacaagtcttagaatgtgaacgtaatcaaaccctggttcaaactgcctggaattacatgaatgacagtcttcgaaccaatgtgtttgttcgatttcaaccagagactatagcatgtgcttgcatctaccttgcagctagagcacttcagattccgttgccaactcgtccccattggtttcttctttttggtactacagaagaggaaatccaggaaatctgcatagaaacacttaggctttataccagaaaaaagccaaactatgaattactggaaaaagaagtagaaaaaagaaaagtagccttacaagaagccaaattaaaagcaaagggattgaatccggatggaactccagccctttcaaccctgggtggattttctccagcctccaagccatcatcaccaagagaagtaaaagctgaagagaaatcaccaatctccattaatgtgaagacagtcaaaaaagaacctgaggatagacaacaggcttccaaaagcccttacaatggtgtaagaaaagacagcaagagaagtagaaatagcagaagtgcaagtcgatcgaggtcaagaacacgatcacgttctagatcacatactccaagaagacactataataataggcggagtcgatctggaacatacagctcgagatcaagaagcaggtcccgcagtcacagtgaaagccctcgaagacatcataatcatggttctcctcaccttaaggccaagcataccagagatgatttaaaaagttcaaacagacatggtcataaaaggaaaaaatctcgttctcgatctcagagcaagtctcgggatcactcagatgcagccaagaaacacaggcatgaaaggggacatcatagggacaggcgtgaacgatctcgctcctttgagaggtcccataaaagcaagcaccatggtggcagtcgctcaggacatggcaggcacaggcgctgactttctcttcctttgagcctgcatcagttcttggttttgcctatctacagtgtgatgtatggactcaatcaaaaacattaaacgcaaactgattaggatttgatttcttgaaaccctctaggtctctagaacactgaggacagtttcttttgaaaagaactatgttaatttttttgcacattaaaatgccctagcagtatctaattaaaaaccatggtcaggttcaattgtactttattatagttgtgtattgtttattgctataagaactggagcgtgaattctgtaaaaatgtatcttatttttatacagataaaattgcagacactgttctatttaagtggttatttgtttaaatgatggtgaatactttcttaacactggtttgtctgcatgtgtaaagatttttacaaggaaataaaatacaaatcttgttttttctaaaaaaaaaaaa

SEQ ID NO: 246 - DNA, 466 bp, Homo sapiens
  misc_feature: Incyte ID No: 1075696.8
gctcatcccaggtattgttgtgggtgggcagaagtctgttttcttcatggttttctgacctttgcctctcccctcaggaaatgctgacttttaacccacacaagcgaatctctgcctttcgagctctgcagcactcttatctacataaggatgaaggtaatccggagtgagcaatggagtggctgccatggaaggaagaaaagctgccatttcccttctggacactgagagggcaatctttgcctttatctctgaggctatggagggtcctcctccatctttctacagagattactttgctgccttaatgacattcccctcccacctctccttttgaggcttctccttctccttcccatttctctacactaaggggtatgttccctcttgtccctttccctacctttatatttggggtccttttttatacaggaaaaacaaaacaaagaaataatggtcttttaaa

SEQ ID NO: 247 - DNA, 2372 bp, Homo sapiens
  misc_feature: Incyte ID No: 1075696.1
ccctcagcgcatgggtggcggtcacgtgcccagaacgtccggcgttcgccccgccctcccagtttccgcgcgcctctttggcagctggtcacatggtgagggtgggggtgagggggcctctctagcttgcggcctgtgtctatggtcgggccctctgcgtccagctgctccggaccgagctcgggtgtatggggccgtaggaaccggctccggggccccgataacgggccgcccccacagcaccccgggctggcgtgagggtctcccttgatctgagaatggctacctctcgatatgagccagtggctgaaattggtgtcggtgcctatgggcacagtgtacaaggcccgtgatccccacagtggccactttgtggccctcaagagtgtgagagtccccaatggaggaggaggtggaggaggccttcccatcagcacagttcgtgaggtggctttactgaggcgactggaggcttttgagcatcccaatgttgtccggctgatggacgtctgtgccacatcccgaactgaccgggagatcaaggtaaccctggtgtttgagcatgtagaccaggacctaaggacatatctggacaaggcacccccaccaggcttgccagccgaaacgatcaaggatctgatgcgccagtttctaagaggcctagatttccttcatgccaattgcatcgttcaccgagatctgaagccagagaacattctggtgacaagtggtggaacagtcaagctggctgactttggcctggccagaatctacagctaccagatggcacttacacccgtggttgttacactctggtaccgagctcccgaagttcttctgcagtccacatatgcaacacctgtggacatgtggagtgttggctgtatctttgcagagatgtttcgtcgaaagcctctcttctgtggaaactctgaagccgaccagttgggcaaaatctttgacctgattgggctgcctccagaggatgactggcctcgagatgtatccctgccccgtggagcctttccccccagagggccccgcccagtgcagtcggtggtacctgagatggaggagtcgggagcacagctgctgctggaaatgctgacttttaacccacacaagcgaatctctgcctttcgagctctgcagcactcttatctacataaggatgaaggtaatccggagtgagcaatggagtggctgccatggaaggaagaaaagctgccatttcccttctggacactgagagggcaatctttgcctttatctctgaggctatggagggtcctcctccatctttctacagagattactttgctgccttaatgacattcccctcccacctctccttttgaggcttctccttctccttcccatttctctacactaaggggtatgttccctcttgtccctttccctacctttatatttggggtccttttttatacaggaaaaacaaaacaaagaaataatggtctttttttttttttttaatgtttcttcctctgtttggctttgccattgtgcgatttggaaaaaccacttggaagaagggactttcctgcaaaaccttaaagactggttaaattacagggcctaggaagtcagtggagccccttgactgacaaagcttagaaaggaactgaaattgcttctttgaatatggattttaggcggggcgtggtggctcaactttttatttattagcttgttggtcttcaacctctgtaagcctcagtttcctcacttatcaatcatctactgctgtatagagacaggtccatctcctagcatgcagggtgaggctaatgtgacatttgaaaactccagagtgctgctgacagtggttggaggtgaaggaggaggaaataaaagcaatgtgagaatagctttaaagaaaggaagggcaaaaagttgaaaagaaagaggcagtgtggagagatggagccaacagcagcatgggagtccctggctagggtcagggcttagatgacgacattgttggttgggttcacttgctctctgaactgcacagggaatcgagctggtcattagacatggcctggagccagtcactggaaaaggaaatcaatacccagactgattctcagaacagccaccatttgtatgattttaatccatagaatcattctgaaagcttcttaatcttcacctgtctcctggcagaaaccggagtgcttgggatagacagctccattcttgccctttaatgtgccatccaggaagttgcccgtgtaaaactggacccccgggctgggtggtgtatacttctagtacccgcccgcttgcagcatgatgcacccttgcacaaaaatgcttttctttagatcccttcagacctcgatccg

SEQ ID NO: 248 - DNA, 571 bp, Homo sapiens
  misc_feature: Incyte ID No: 1328182.7
  unsure 545: a, t, c, g, or other
gatcccggctgaaagccattttgtttttcagctcacttcaagggtacctgaagcgaattggcaccaaagcagcagctgtattgccgcagttctagcttcaccttcacgatgtttcccttggtcaaaagcgcactaaatcgtctccaagttcgaagcattcagcaaacaatggcaaggcagagccaccagaaacgtacacctgattttcatgacaaatacggtaatgctgtattagctagtggagccactttctgtattgttacatggacatatgtagcaacacaagtcggaatagaatggaacctgtcccctgttggcagagttaccccaaaggaatggaggaatcagtaatcatcccagctggtgtaataatgaattgtttaaaaaacagctcataattgatgccaaattaaagcactgtgtacccattaagatatggcattattgaagaaataaagtacatttgaaaccttcattgtaggttttgtttctttgtaaatgaaactaagcttgatcactttagcctttatgttaatattaaagtncaatgctgtgcagcttcttaaatagg

SEQ ID NO: 249 - DNA, 1339 bp, Homo sapiens
  misc_feature: Incyte ID No: 1418210CB1
tggctacagttgaaaccctcacaccacgcaggaagaggtcatcatcatgtcggacgatttcttatggtttgaaggcatagctttccctactatgggtttcagatccgaaaccttaagaaaagtacgtgatgagttcgtgataagggatgaagatgtaataatattgacttaccccaaatcaggaacaaactggttggctgagattctctgcctgatgcactccaagggggatgccaagtggatccaatctgtgcccatctgggagcgatcaccctgggtagagagtgagattgggtatacagcactcagtgaaacggagagtccacgtttattctcctcccacctccccatccagttattccccaagtctttcttcagttccaaggccaaggtgatttatctcatgagaaatcccagagatgttttggtgtctggttattttttctggaaaaacatgaagtttattaagaaaccaaagtcatgggaagaatattttgaatggttttgtcaaggaactgtgctatatgggtcatggtttgaccacattcatggctggatgcccatgagagaggagaaaaacttcctgttactgagttatgaggagctgaaacaggacacaggaagaaccatagagaagatctgtcaattcctgggaaagacgttagaacccgaagaactgaacttaattctcaagaacagctcctttcagagcatgaaagaaaacaagatgtccaattattccctcctgagtgttgattatgtagtggacaaagcacaacttctgagaaaaggtgtatctggggactggaaaaatcacttcacagtggcccaagctgaagactttgataaattgttccaagagaagatggcagatcttcctcgagagctgttcccatgggaataacgtccaaaacactctggatcttatatggagaatgacattgattctcctgtccttgtacatgtacctgactggggtcattgtgtaagacttattattttatcctgaaaccttaaatatcaaacctctgcatctctgatcccttccttgttaaaagttaccacggttggccaggcgcggtggttcatgcctgtaatcccagcactatgggaggccgagacgggcggatcacgaggtcaggagactgagaccatcctggctaacacggtgaaaccccatctctactaaaaatacaaaaacccaaaaaaattagccaggcgcattggctcgtgtctgtaatgccagcactttgggaggtaacaagggtcggggatgctcacggggtcaggagatcgagaccatcctgggcaacatgatgaaaccctatctctactaaaa

SEQ ID NO: 250 - DNA, 2386 bp, Homo sapiens
  misc_feature: Incyte ID No: 995929.27
  unsure 1907, 2297: a, t, c, g, or other
gtgaccggggaccgagcatttcagatctgctcggtagacctggtgcaccaccaccatgttggctgcaaggctggtgtgtctccggacactaccttctagggttttccacccagctttcaccaaggcctcccctgttgtgaagaattccatcacgaagaatcaatggctgttaacacctagcagggaatatgccaccaaaacaagaattgggatccggcgtgggagaactggccaagaactcaaagaggcagcattggaaccatcgatggaaaaaatatttaaaattgatcagatgggaagatggtttgttgctggaggggctgctgttggtcttgggtgacaattggtgtgacctttgcagccatggttggagctggaatgctggtacgatcaataccatatgaccagagcccaggcccaaagcatcttgcttggttgctacattctggtgtgatgggtgcagtggtggctcctctgacaatattagggggtcctcttctcatcagagctgcatggtacacagctggcattgtgggaggcctctccactgtggccatgtgtgcgcccagtgaaaagtttctgaacatgggtgcacccctgggagtgggcctgggtctcgtctttgtgtcctcattgggatctatgtttcttccacctaccaccgtggctggtgccactctttactcagtggcaatgtacggtggattagttcttttcagcatgttccttctgtatgatacccagaaagtaatcaagcgtgcagaagtatcaccaatgtatggagttcaaaaatatgatcccattaactcgatgctgagtatctacatggatacattaaatatatttatgcgagttgcaactatgctggcaactggaggcaacagaaagaaatgaagtgactcagcttctggcttctctgctacatcaaatatcttgtttaatggggcagatatgcattaaatagtttgtacaagcagctttcgttgaagtttagaagataagaaacatgtcatcatatttaaatgttccggtaatgtgatgcctcaggtctgcctttttttctggagaataaatgcagtaatcctctcccaaataagcacacacattttcaattctcatgtttgagtgattttaaaatgttttggtgaatgtgaaaactaaagtttgtgtcatgagaatgtaagtcttttttctactttaaaatttagtaggttcactgagtaactaaaatttagcaaacctgtgtttgcatatttttttggagtgcagaatattgtaattaatgtcataagtgatttggagctttggtaaagggaccagagagaaggagtcacctgcagtcttttgtttttttaaatacttagaacttagcacttgtgttattgattagtgaggcgccagtaagaaacatctgggtatttggaaacaagtggtcattgttacattcatctgctgaacttaacaaaactgttcatcctgaaacaggcacaggtgatgcattctcctgctgttgcttctcagtgctctctttccaatatagatgtggtcatgtttgacttgtacagaatgttaatcatacagagaatccttgatggaattatatatgtgtgttttacttttgaatgttacaaaaggaaataactttaaaactattctcaagagaaaatattcaaagcatgaaatatgttgctttttccagaatacaaacagtatactcatgattgctaagtgtttttttatttttgcatatttattgaactgtctaattgaatacagcttgctcttgtcacctcttcaagctttcaagcctttatagaaaagcttctttgtggcttacactggaaattatgaaagcagtttttctcctaagacttttggtttctcgcattgcctctcagactaatcantaaaaagcaaagcaaaacagaactagttctgtcttaatgaaatatatcaacccaaaagtgtaatgaggaaaatgcttcattagtttcccctagcagacttttacttctcttacactgctacaccattacattcttgagacatttgtaagttctttgatacagaagagttatatttagaagtctttaatgaagggaaagaagtctgtatgatgactgaggtgattgctctttttgacaaatgtttattacagtaatgcagaaatactgttaatcatctcaaagtacataggaggcttatttctgaaacaaaggtttcagccagatgttgattagtctaatttttccaagtgaatcatatgcatgccatttgaatagggatttcttcaagtnagcaacttagtttcttgccagtatagtatagtgcagtgtgataagtacatgatacttgtagctagactacctctatttgaatctcaact

SEQ ID NO: 251 - DNA, 2466 bp, Homo sapiens
  misc_feature: Incyte ID No: 235345.1
ggggggtggggggtgggggaggacgccgagcgctgaggcaggggcccgggccgagggcgcggcggggctgcgcgcacgctggggcgcgtggaggggcgcggagggcgaaatgagtctggtaggtggttttccccaccacccggtggtgcaccacgagggctacccgtttgccgccgccgccgccgcagctgccgccgccgccgccagccgctgcagccatgaggagaacccctacttccatggctggctcatcggccaccccgagatgtcgccccccgactacagcatggccctgtcctacagccccgagtatgccagcggcgccgccggcctggaccactcccattacgggggggtgccgccgggcgccgggcccccgggcctgggggggccgcgcccggtgaagcgccgaggcaccgccaaccgcaaggagcggcgcaggactcagagcatcaacagcgccttcgccgaactgcgcgagtgcatccccaacgtacccgccgacaccaaactctccaaaatcaagaccctgcgcctggccaccagctacatcgcctacctcatggacctgctggccaaggacgaccagaatggcgaggcggaggccttcaaggcagagatcaagaagaccgacgtgaaagaggagaagaggaagaaggagctgaacgaaatcttgaaaagcacagtgagcagcaacgacaagaaaaccaaaggccggacgggctggccgcagcacgtctgggccctggagctcaagcagtgaggaggaggagaaggaggaggaggagagcgcgagtgagcaggggccaaggcgccagatgcagacccaggactccggaaaagccgtccgcgctccgctctgaggactccttgcatttggaatcatccggtttatttatgtgcaatttccttcccctctctttgaccccctttgaggcatctgctccccgtctccccctccaaaaaaaaagtggatatttgaagaaaagcattccatattttaatacgaagaggacactcccgtgtggtaagggatcccgtcgtctcatagattctgtgtgcgtgaatgttccctcttggctgtgtagacaccagcgttgccccccgccaacctactcaaccccttccagataaagacagtgggcactagtgcgtttgtgaagtgtatctttaatacttggcctttggatataaatattcctgggtattataaagttttatttcaaagcagaaaacagggccgctaacatttccgttggggtcggtatctagtgctatccattcatctgtggtcgttccctctttgaagatgtttccaacagccacttgttttgtgcacttccgtcctctaaaactaaatggaatttaattaatattgaaggtgtaaacgttgtaagtattcaataaaccactgtgttttttttttacaaaaaccttaatcttttaatggctgatacctcaaaagagttttgaaaacaaagctgttatacttgttttcgtaatatttaaaatattcagaagtaaactaaattatcatgattgcctctaactttattttaaagactcagtgggttccaaccagttcaccctgacctgcggcctacgcaggaggaggaggtgctcttaaagaggaaggtgtccttgttacaaatcctgcaaatgggtctgggggtttgtcgggtgtgggtgtctccttccctcttcccccagctggagaacgctgagtagtctctagaaggaagatctgggctggagaacccagtccggcagttcgctcagaaggtgtaaaggtgctcttggctttcctgaagtcaatcagaagccatttcttgaggccgtcagtttttgtttggagagtgtttctggtggaggagttgtgaggagaaccccggcattattgctgcaacgggaactagtctggggtgtttaattcaaactatggggctttcatccaagaaaaaaaaaaggaaaaagaaaagagaggagaggattttgcttgtattctatacgggggcttctcatctgagcaggcgggaaaggcgggtggagggagtttcgaaaaagtccatgattaggtaacaaggaattttacgtcaagtaagaaatcgtgaacaagaccacggatttaaaggggggcgaggggcgggttagatttacaaggagttacagggaactcaatattaactgtgcggtgtctgaagtcttcccggccgcagcccagcgaaacaagcgacacccttccgggactaccggcagcacgggacccgggatctctccctgttgggtctttgggctccctgagtcccagctcgtcccagaagaaagtcccagcggcctcctttgcctgcagccttggcggaagcttgaatctcagctctagaaaccggagaaactaaagtgcctgtgcaggctgcgggaaggggggaggaggctgggagggattttggaagggggtgggaggaggag

SEQ ID NO: 252 - DNA, 3764 bp, Homo sapiens
  misc_feature: Incyte ID No: 196963.12
  unsure 600: a, t, c, g, or other
aaatttggacttaatgtttcatatttattttctgacaccaacattaaaacaagagaatgctcattccacaatgaggaaattttctaatgaatttttattatcaccagcatctttaaaaatttaagaggaattctctcgagagtatatataaaaaagaaattaaaggcaaatattttgctgttaaggatttaaaaataaacagaaacatagagtataaaattttcatttcactgtgccctcatttaaaattataagaatataagcaaataacatccaatgtcagaagagattcagggtgaccatttgcagtatttagtggcaaattagtagcatcatgaaaaatttcaattccatttaaaaaaatagctttcatttaaataataattaacgtttagctttatctctgtatataattagactttcttttggcttagacaattccattttctccaactgggagctgtgaaggatcaagtcctactttcttcattgatacggcaatatcaaataaatagtcataacactcacacatggttttgggccttctcccatggtttccccccacacatatactccatggacgtctgaccaggtactggnacagggagtctggggtattccattcattgcatgagcccattccaatctttgaggtctttctccctcaggtggaatctcaataatgggggaccactaacatatcatcatatctataataccctccggaagtacatttctttattccttttatcatctcttgatgtgtaattttaaactcccgtcctggaaaagagaagggtggccatcacagcagctttagagtgggtatgaatcactgcacctgctcctctcattgtgtaagcatccatgaaaaagaggagtacactggctttttttttagcttcttcgatggcgaaggtcccacttatgtccttttcatttatatcaataaacaaacatgtcttcaggctgaattcgttccttttgcactcctgaaggagcaatgtagatttcaatcgccatgcttcaagctaattcctcctccagtgccacagtgacacagcctaaatggtaaaactgtttgcaaagttctgggatcaggtatctgggatgctccttgtcctgcgcgccgcatctccgggaacaaccagtctccctcccgagcatcacagccagacatggccccagtaccagggacccggcgcaggcctccaatctccgcacggctttgcgcgcagcgcttagcctgggatgcggcagcgaggccgcaaatgcaatcaggcggcgctgagggcagcccgggggcggggcgaacggggcgggggccggggtctggtaaggccccgccggctgagatatccagcggcgcacctgacttcccgggaggtgatcccatttaagatactaatgcccatcactgtctcctacaatggaagaaggaaacattgtgaaatggctgaaaaaggaaggtgaagcggtgagtgctggagatgcattatgtgaaattgagacttgacaaagctgtggttaccttagatgcaaagtgatgatggaatcttggccaaaatccgtggttgaagaaggaagtaaaaatatacggctaggttcactaattggtttgatagtagaagaaggagaagattgggaaacatgttgaaattcccaaagacgtaggtccttccaccaccagtttctataacctgcagagcctcgccccttcaccagaaccacagatttccatccctgtcaagaaggaacacatacccgggacactacggttccgtttaagtccatcttgcccgcaatattctggaaaaacactcactggatgctagccagggcacagccactggccctcgggggatattcactaaagaggatgctctcaaacttgtccagttgaaacaaacgggcaagattaccgagtccagaccaactccagcccccaacagccactcccacagcaccttgcgcccacacagcacacagttggacacatctaatccccggcctgtgatcccatccagtatcaactcctggacaacccaatgcagtgggcacattcactgaaatcccccgccagcaatattccgaagagtcattgccaagagattaactgaatctaaaagtactgtacctcatgcatatgctactgctgactgtgaccttgggagcttgttttaaaagtttaggcaagatctggtcaaagatgaccattaaaagtatcagtaaatggtttttttcatcaagggcagcagctgtttacccttaaacaaatgccagatgttaatgtaagctgggatggagagggcccaaagcaactgccatttattgacatttcagtgggctgtggcaacagataaagggctacttactcccaatcataaaaaagatgctgctgctaaaggtatccagggaaattgctgactctgtaaaggctctatcaaagaaagcaagagatggaaaattgttggcttgaagaataccaagggaggatcttttagtatttccaacttggggatgtttggcatcgacgaatttactgcagtgattaaccctcctcaggcctgcattttggcggttgggaggttccgaacctgtgctgaagctcactgaggatgaagagggaaatgccaaactgcagcagcgccagcttcataacagtcacaatgtcaagtgacacgtcgagtggttgatgaccgaactggcaaccaggtttcttaaaagttttaaagcaaacctagagaatcctatccgacttgcctagtcctcaaagataagaagttgggtgttcagcttagttgattccagtagtttgtttacccaggaaacatatgttattaggaaaacaacttgtgggtatcaatgtatgacgggcttgaaaatgttaattaatttaaggtgaaagcatttgacccagggtgtcttcatcttcaattggggtttaatgttatagaaataaatgatgataaactctaactaataaaggaaagagaatatttggttactcagatcccatttttaacctctggtgctgtataaagggaatattaaactagatgtaaatccaaagtatatgtttgggctcatttgagccattttgggaatatttgaggaatgtatggatacatgtaaaattaaaaaaactattaggaactgtacccctaattatgttgaaggtaggaagtgatcttccaaagagatggccattaacttagcagtgggacctcacttttacaagcactgctctagatatacttgaagaatttaatatgtacagaagtttattctggataataaataaataaggatcacactgtattaaggggttatgggcaacattaatgaatttttttatgtaccataaagcccatatgtttagggtggtttcctatcctgtccttgtttttcacttatataacacctgtgaacttctaaagaaagaggataaaagaagcatgaatgaaaagaatgacatttcaaaaaaatggttcaatgaaaaactatagctaaaatatgtaaacctttctaggtaaaccgcttgccttcatcttgagtcgggaatatatttaaataaattgtgttatctcttgccaaacattttgttagtgtttatttaaaaacaaaatgttgtttcttaatgcatttaaatcagttttgtattgtgcagtaaaattgtgagaaaatacaaacatttctattgtattttaaatgttaaaacacaaaagttcaataaaccttgaagttgaaaaaaaaaaaaaaaa

SEQ ID NO: 253 - DNA, 7557 bp, Homo sapiens
  misc_feature: Incyte ID No: 096919.1
  unsure 3501, 4594-4738, 4890-5188, 6478-6500, 6840: a, t, c, g, or other
cgcggtgctgctgctcagtgggagcgggtcttcgcaactgtctccgcgtggcgcgcgcctctagccgcccttcccctggcggctacggccggagggagcggaggcgagcgggagtcgggctccatggagagcggcggacaactgggcagaggcggagctttcatctcggcaccctggttccagtgacccgcgctagcgtcccgtcccgcccgcgtcggagcggccgccggccccgggactgaccggcctcgccgcacctcccgcaccgactagcgctcccgggcgctcctgcgcccgactcgccctcgcccccactccccggcggggtggcggcggccgggcccccacggcggcggcggagcagcagcagcagagaggagcccgcctctatgatgaagttcaagcccaaccagacgcggacctacgaccgcgagggcttcaagaagcgggcggcgtgcctgtgcttccggagcgagcaggaggacgaggtgctgctggtgagtagcagccggtacccagaccagtggattgtcccaggaggaggaatggaacccgaggaggaacctggcggtgctgccgtgagggaagtttatgaggaggctggagtcaaaggaaaactaggcagacttctgggcatatttgagcagaaccaagaccgaaagcacagaacatatgtttatgttctaacagtcactgaaatattagaagattgggaagattctgttaatattggaaggaagagagagtggttcaaagtagaagatgctatcaaagttctccagtgtcataaacctgtacatgcagagtatctggaaaagctaaagctgggttgttccccagccaatggaaattctacagtcccttcccttccggataataatgccttgtttgtaaccgctgcacagacctctgggttgccatctagtgtaagatagagagaactgggtaggcctctcccaccatgtgcagtctcatggggagaggcttctttcgtttcctcgtcaaacatctgattgacgcttgcaaactgtctgaatttgccatgcaaggttttcaaacaatttgcatgtttttcagatgctttcaaatctttttttaaaaaaatagtgtaaaatattttaataagccaaagccatgtggaatttttgtttagatgccttaactgtgccacaccccacaaccccctatattattttggttgtctatttctcacagcatattttcagttttttgtccatttgacatcagtctgtggtttattttgtcatcagattacttgtgggtatacctaccccaaaattgttttctcattcacagcattagcatattcagcaaatccatctgtggtgggaattaaaaatattattggtattaaagaaatccattcaccccaaaacttgttttacaggattacaattttaattcaaaatttccagatttgggctatttctgtatgatccaataacttattttgtcacagggcttaatttgccatttttggggatttgtcgactcattttgtctgaattttcacaactggtattatgtcactagctacctgatacggctatttcccttataactcaatagtaccttaacacaaagtataactctgtagagttggtgaatattttagggaaatattagcaaaatgcatgtagtaaagacatcttatgaaaactgtattcatggaatttgatttagcatgctcagttgccagttcccattatcgatactctttctttgcagaataccttagaaccgttatttccctcagtgtagattgctcttaaaatgtattcagttatttagtggcccccacaggagtggagtcttgaaatctaattctaaatgccagtcagtgatgatcgcatcacagttgagtgaaatggccttcctgttcagctgttagagactgaagattgttagggcaccttagaatgtctcatcttttctaggttgtcaacaggtactatttgtcacataactaactttcgaggcactggaacatacctgaactaagaattaaatcttttactttatactcacttaaaatcaagaatcccatctaaaacacataggtaccttatctgaaactcttgcacttccccaaccagggcagaaatgaggtgggagaagtttgactaaaatgagggatgggggaaagtaaaagatgttttttttttttggaaactcgttttggtcacccaggctgggagtgcaatggggacaatctcaactcaccgcaacctccggcctcccggggttcaagcgattctcctggcctcagcctcccgagtagtggggattacaaggcgcctgcctccatgccgggctaatttggtattttaagtaagagacagggtttcttcatgtgggctcaggcgtggtctcaaactcctaacctcgtgatccgccgtgcctcgacctcccaaagtgcggggattacaggcattgagccaccatgcccagccaaagatcatttttttatatagacttcagccctttgtaaatattgtaactggggagtatagagtagaaaaaaagtatagttaaaacatttgttctacaaattaacctttaaaaatataattactgctaaaaatagagtgctgttacacttaaggaaaattagtgccattttggaaatgagatcttgtgccataaatacagctgaactgaatataaatgttcacaaattaatgctgtcaaaggaatgagtaaagcagaaaaacttttaaccagcaacatttcaagtacgtagtgtgatcaaacatgatcatccagaatttttatatttttttctttgtacagaggttacatattctgggtgttcttttataaaggaaacattttaaatcccacaaattgacactttctatcttcaatggactaagatttttttggtcagtaatctctgaaatttccttaaattatatacttaacatagcagagaaactggattgtttttgtatataagactgcttccacctgaaatgctgtcataagtactgggggggtgggggagtgcccatcttgtacatgatattcttagaggtaataaggtaatgatgcatgaatttattttataaactcttggactatgtatttgacatgtaaaatatgtacagtattaacgtcaaccatctctttaaagttagcctataaatattgttgtataattttctttggtcagaaacacttggactgaatagtgacactcggtaaggattttcagtgccatttagcaaaacgtctttagtctatgcaactagcaaaaatctgcataatgcaacaacacagttttcacacttcaaattttacatgaggggttcttcacgattctcctggaacccagtctagcaaaatgagaggaaaggccctagggagatttatttctgttaaatagttaactctgctgagtatgacaaatagtgtctactatctcaaccctccaaaatttgcagagtgttgggactgtcatttgtgattttttttttntttcttggtggggtagttgaataaaattgggcagctaaatttttcagttccatgtgcctcccaaataaaaaacagaaaataagtagtttttgtgaattgacttgcagacaaagtagaaactgtgctgcatgatgttattttgtaaacagatgacattttctgaccaggcacatgccatccaattttctgtcaatcacactgttgtataaagcagcagaactgaaggggaaaaatgattgttgtatacactgaattgctttgcatggtctcatttgagataattgatgtaagaatcctgacttttttatatttggaaacatcaaataaaaatggaaaaaatgatcatggctttaaaaaaaaaacaaaaacacacacacatgaactcagatttgcaaaccaggtttctgaaactttgggtaaggtgtatgcttttaactttgaaatgtataaacacccagcggaaacgtatacctttcagtgcatagtgcattgtgtgcttaccctgggttgtttaaacttgtgttcaaatattccccctccaagtgaaagcctgtcgggaattccacagtaacacctttactgttctcccattgatgatcatatacgttacctcttcctagcggtacatttgtatgatccttactactggaattaccgggttaaaaggaaatgcttaccaccaagatgtcagtattctcctcatggatattttcaatctcaatgttgccagtctaatagtatagtatgtggttgctttactgctgttctccccacccccgtggagttgtgtcattattttaatgaatgtgagctcttgacttactctagaattctaatacagatactttctgcactagtatcacttttattattgcagttccatttaaaagcataactggctaagtcaccgccccacccgccgccattacatttcctaaaacatactgcggccaaagaccaactgtagaatccttaagtcctgttcaagtgtcacttcattttttattaggggtttcttagttggagggcatgagaaacttggccctttccaatgttgtcttcacattggagtataagaattctctataggacnnnnnnnnnnnnnnnnnnnnnnnnnnnnnnnnnnnnnnnnnnnnnnnnnnnnnnnnnnnnnnnnnnnnnnnnnnnnnnnnnnnnnnnnnnnnnnnnnnnnnnnnnnnnnnnnnnnnnnnnnnnnnnnnnnnnnnnnnnnnnnnnntgcaggtctttttaagcatttgctgttcaataataagcatcttctttatgcctagtatttgtgataagagcacaaaacaattttctaatctcaaagagcttatattctagtggggtagagataagtgatttatcttggtgtagttttggctnnnnnnnnnnnnnnnnnnnnnnnnnnnnnnnnnnnnnnnnnnnnnnnnnnnnnnnnnnnnnnnnnnnnnnnnnnnnnnnnnnnnnnnnnnnnnnnnnnnnnnnnnnnnnnnnnnnnnnnnnnnnnnnnnnnnnnnnnnnnnnnnnnnnnnnnnnnnnnnnnnnnnnnnnnnnnnnnnnnnnnnnnnnnnnnnnnnnnnnnnnnnnnnnnnnnnnnnnnnnnnnnnnnnnnnnnnnnnnnnnnnnnnnnnnnnnnnnnnnnnnnnnnnnnnnnnnnnnnnnnnnnnnnnnnnnnnnnnnntatcttggtgtttttacatccttcagtatttttcaaggttttacagcttttttatctatagacttataccatcttcaaaagcaatacaattttatttgtagacgtgatttcccccaccaaatgcacattttatggagctctaggacaaaagtcaggatgaaaagtaatctatcgctggtgctactttaataccttcctgactggtgccactggctaaattctagcagtacgatgagagggccattaaggcctatcttagcaagcaagacattatagcaaagacctaaacactcaaaggttcaacgtcttctagccagggaactattctctaattcttccaccttgatatgatttcagcaaattctgataacccggtattactcttaatgcatttttgtaacatttgacaaacatctcccaatatgtagactcccactctcctgatgctaatcagtatcagacaatggaagtaaattttcctgcttttctcaacttttcctcaaattcatgttagtgaagtactttcatttggccatcattatttatcaaccttaagaaacatgcctattgacgaagtaaatatactaggaattcaacgtatctacgggaatgtggacaaagacatataccaagacaaggcactagagtgaaaagccattaaaataaaatgctcagcagcaaaggatttgtaatggttaacttgcaatatatccatatggtgtaatattacagtcattagaaatgacatttgcgtaaggatctgagtggaaactgatacagcctgtcggagagctactgagtagtattttatcacagctgcatacataccctttcacccaacagttccactcctgggagtctagtcaacaaatggacaagttgcacaaccaagctatggtcaaatatgtgtgttgtaggatttatgaaactggtaccaatttaatattcaaatgtgattaagtcatggcaatctatttactggatactttgtggttaccaaagagctatgtgctgccacagggagtcctttcaatagtgattgaaaaaggcagaacactactagacagaactacctgttttatgcatgtattggcatacactgaaaaagcttagtcacttaaaatgaggttgtacagattgtagattttgtttttaaacgcctgtatggtttaaaaaatgttttgggaaatagacatgagcagggcagagaactacaacctacaggccaaaccccaccccactgcctgtttgtacggccaacaagtttaaaatttttttaatgttttaggnnnnnnnnnnnnnnnnnnnnnnnctatgcccatttgtttacaaatcgtctgtgggtgctttctcactacaatggcagaattcagtagttgagacagacctatggtccacaaaggccgaaatatttactgttttaggagaaaaaaacaacatgaattgtaataacttggacttacttggttgctcagtcctgatgtgtcctgttaaaacctaagagaaacagcaccaagttcaatctagtgcaatcagcctatcacatctaagctgcttttgccagatctgatatctactcccgaccttaagccaggagactttgtaaacttactaggttataataaaacttaagaactatcgatatttactantctacatcatggaactatttcaaaagcagtcatatggtaagatggatcaggagtctttaaaaataaaactgagaaagaaaaatcatgtgatcaattcagtagtagagacagaggttggtatcaagtctatgttcatacacttaccagtgccacccagcagggccatacaagacacatgaaatgagatcagctcaagggtgacaagatgaaactgggagagggccggggagacccgaactcttaatattggattccacacaagaggaaaaattttagtccagctcccagcatggcagctaatggcaagttactcagtaccataaagccaactcttggaatatacctgacttccacgataaaatggagatgagtgcaggggtgagtgtatagttaagaaaacaaacaatatattactagtccaggtggtagatgacagatttttattatttacacttctctcaaattattacattcagcatgttttgctttttatgttatttaaagtataaaccctcatataattccctaagatgggtggcatgccaagtagctaaatgaaatatcatcccagcccaaaagtacttattcgaatgaaatattacatttttcttaaataaagcaataaattaggtaccctattatcatggtattttcttttttggccagcttttctagataaggttgtattgctactgcaactaacaaaaaagatgtggc

SEQ ID NO: 254 - DNA, 1420 bp, Homo sapiens
  misc_feature: Incyte ID No: 1049880.12
gtcttccggcgcagccccgtccctgttttttgtgctcctccgagctcgctgttcgtccgggttttttacgttttaatttccaggacttgaactgccatgtcctctgaagaaggaaagctcttcgtgggagggctcaactttaacaccgacgagcaggcactggaagaccacttcagcagtttcggacctatctctgaggtggtcgttgtcaaggaccgggagactcagcggtccaggggttttggtttcatcaccttcaccaacccagagcatgcttcagttgccatgagagccatgaacggagagtctctggatggtcgtcagatccgtgtggatcatgcaggcaagtctgctcggggaaccagaggaggtggctttggggcccatgggcgtggtcgcagctactctagaggtggtggggaccagggctatgggagtggcaggtattatgacagtcgacctggagggtatggatatggatatggacgttccagagactataatggcagaaaccagggtggttatgaccgctactcaggaggaaattacatgagacaattatgacaactgaaatgagacatgcacataatatagatacacaaggaataatttctgatccaggatcgtccttccaaatggctgtatttataaaggtttttggagctgcactgaagcatcttattttatagtatatcaaccttttgtttttaaattgacctgccaaggtagctgaagaccttttagacagttccatctttttttttaaattttttctgcctatttaaagacaaattatgggacgtttgtagaacctgagtatttttctttttaccagttttttagtttgagctcttaggtttattggagctagcaataattggttctggcaagtttggccagactgacttcaaaaaattaatgtgtatccagggacattttaaaaacctgtacacagtgtttattgtggttaggaagcaatttcccaatgtacctataagaaatgtgcatcaagccagcctgaccaacatggtgaaaccccatctgtactaaacataaaaaaattagcctggcatggtggtgtacgcctgtaatcccagtgacttgggaggctgaggcaggagaatcgcttgaacccgggaggcggaggttgcagtgagctaagatcgcgccactgtactccagcctgggcaacagcgagactccatctcaaaaaaaaaaggaaatgtgtatcaagaacatgattatccaggggtattttctaattcagatcatcaaactgattatatagaagagttggctttaaaatgtttgcaaatgtctttttttttttaatactggaagaaaaaatattctgttgtgtctcatacagtgcttaggatgtctttcacagagcttattaaaaagatgaaacctgaaaaaa

SEQ ID NO: 255 - DNA, 2355 bp, Homo sapiens
  misc_feature: Incyte ID No: 5511889CB1
cgccctttttttttttccccagggagtgggggctggcccttactgctttataagcaccagctcaagaaggaacctacagcctcttggaaaggaatctcactaggggcttgactgcgtgggtctgtagcgctttcactgtaagaaagcaagatgcattttagaaactttaactacagttttagctccctgattgcctgtgtggcaaacagtgatatcttcagcgaaagtgaaaccagggccaaatttgagtccctctttaggacgtatgacaaggacatcacctttcagtattttaagagcttcaaacgagtcagaataaacttcagcaaccccttctccgcagcagatgccaggctccagctgcataagactgagtttctgggaaaggaaatgaagttatattttgctcagaccttacacataggaagctcacacctggctccgccaaatccagacaagcagtttctgatctcccctcccgcctctccgccagtgggatggaaacaagtggaagatgcgaccccagtcataaactatgatctcttatatgccatctccaagctggggccaggggaaaagtatgaattgcacgcagcgactgacaccactcccagcgtggtggtccatgtatgtgagagtgatcaagagaaggaggaagaagaggaaatggaaagaatgaggagacctaagccaaaaattatccagaccaggaggccggagtacacgccgatccacctcagctgaactggcacgcgacgaggacgcattccaaatcatactcacgggaggaatcttttactgtggaggtggctggtcacgacttcttcggaggtggcagccgagatcggggtggcagaaatcccagttcatgttgctcagaagagaatcaaggccgtgtccccttgttctaatgctgcacaccagttactgttcatggcacccgggaatgacttgggccaatcactgagtttgtggtgatcgcacaaggacatttgggactgtcttgagaaaacagataatgatagtgttttgtacttgttcttttctggtaggttctgtctgtgccaagggcaggttgatcagtgagctcaggagagagcttcctgtttctaagtggcctgcaggggccactctctactggtaggaagaggtaccacaggaagccgcctagtgcagagaggttgtgaaaacagcagcaatgcaatgtggaaattgtagcgtttcctttcttccctcatgttctcatgtttgtgcatgtatattactgatttacaagactaacctttgttcgtatataaagttacaccgttgttgttttacatcttttgggaagccaggaaagcgtttggaaaacgtatcacctttcccagattctcggattctcgactctttgcaacagcacttgcttgcggaactcttcctggaatgcattcactcagcatccccaaccgtgcaacgtgtaacttgtgcttttgcaaaagaagttgatctgaaattcctctgtagaatttagcttatacaattcagagaatagcagtttcactgccaacttttagtgggtgagaaattttagtttaggtgtttgggatcggacctcagtttctgttgtttcttttatgtggtggtttctatacatgaatcatagccaaaaacttttttggaaactgttggttgagatagttggttcttttaccccacgaagacatcaagatacacttgtaaataaagctgatagcatatattcatacctgttgtacacttgggtgaaaagtatggcagtgggagactaagatgtattaacctacctgtgaatcatatgttgtaggaaaagctgttcccatgtctaacaggacttgaattcaaagcatgtcaagtggatagtagatctgtggcgatatgagagggatgcagtgcctttccccattcattcctgatggaattgttatactaggttaacatttgtaatttttttctagttgtaatgtgtatgtctggtaaataggtattatattttggccttacaataccgtaacaatgtttgtcattttgaaatacttaatgccaagtaacaatgcatgctttggaaatttggaagatggttttattctttgagaagcaaatatgtttgcattaaatgctttgattgttcatatcaagaaattgattgaacgttctcaaaccctgtttacggtacttggtaagagggagccggtttgggagagaccattgcatcgctgtccaagtgtttcttgttaagtgcttttaaactggagaggctaacctcaaaatattttttttaactgcattctataataaatgggcacagtatgctccttacagaaaaaaaaaaaaaaa

SEQ ID NO: 256 - DNA, 2729 bp, Homo sapiens
  misc_feature: Incyte ID No: 1360501CB1
ctacaccttttccatttgctaataaggccctgccaggctgggagggaattgtccctgcctgcttctggagaaagaagatattgacaccatctacgggcaccatggaactgcttcaagtgaccattctttttcttctgcccagtatttgcagcagtaacagcacaggtgttttagaggcagctaataattcacttgttgttactacaacaaaaccatctataacaacaccaaacacagaatcattacagaaaaatgttgtcacaccaacaactggaacaactcctaaaggaacaatcaccaatgaattacttaaaatgtctctgatgtcaacagctacttttttaacaagtaaagatgaaggattgaaagccacaaccactgatgtcaggaagaatgactccatcatttcaaacgtaacagtaacaagtgttacacttccaaatgctgtttcaacattacaaagttccaaacccaagactgaaactcagagttcaattaaaacaacagaaataccaggtagtgttctacaaccagatgcatcaccttctaaaactggtacattaacctcaataccagttacaattccagaaaacacctcacagtctcaagtaataggcactgagggtggaaaaaatgcaagcacttcagcaaccagccggtcttattccagtattattttgccggtggttattgctttgattgtaataacactttcagtatttgttctggtgggtttgtaccgaatgtgctggaaggcagatccgggcacaccagaaaatggaaatgatcaacctcagtctgataaagagagcgtgaagcttcttaccgttaagacaatttctcatgagtctggtgagcactctgcacaaggaaaaaccaagaactgacagcttgaggaattctctccacacctaggcaataattacgcttaatcttcagcttctatgcaccaagcgtggaaaaggagaaagtcctgcagaatcaatcccgacttccatacctgctgctggactgtaccagacgtctgtcccagtaaagtgatgtccagctgacatgcaataatttgatggaatcaaaaagaaccccggggctctcctgttctctcacatttaaaaattccattactccatttacaggagcgttcctaggaaaaggaattttaggaggagaatttgtgagcagtgaatctgacagcccaggaggtgggctcgctgataggcatgactttccttaatgtttaaagttttccgggccaagaatttttatccatgaagactttcctacttttctcggtgttcttatattacctactgttagtatttattgtttaccactatgttaatgcagggaaaagttgcacgtgtattattaaatattaggtagaaatcataccatgctactttgtacatataagtattttattcctgctttcgtgttacttttaataaataactactgtactcaatactctaaaaatactataacatgactgtgaaaatggcaatgttattgtcttcctataattatgaatatttttggatggattattagaatacatgaactcactaatgaaaggcatttgtaataagtcagaaagggacataggattcacatatcagactgttagggggagagtaatttatcagttctttggtctttctatttgtcattcatactatgtgatgaagatgtaagtgcaagggcatttataacactatactgcattcattaagataataggatcatgatttttcattaactcatttgattgatattatctccatgcattttttatttcttttagaaatgtaattatttgttctagcaatcattgctaacctctagtttgtagaaaatcaacactttataaatacataattatgatattatttttcattgtatcactgttctaaaaataccatatgattatagctgccactccatcaggagcaaattcttctgttaaaagctaactgatcaaccttgaccacttttttgacatgtgagatcaaagtgtcaagttggctgaggttttttggaaagctttagaactaataagctgctggtggcagctttgtaacgtatgattatctaagctgattttgatgctaaattatcttagtgatctaaggggcagtttagtgaagatggaatcttgtatttaaaatagccttttaaaatttgttttgtggtgatgtattttgacaacttccatctttaggagttatataatcaccttgattttagtttcctgatgtttggactatttataatcaaggacaccaagcaagcataagcatatctatatttctgactggtgtctctttgagaaggatgggaagtagaaaaaaaaaaaagaaagaaaggaaaggaagagaggagagaagaaggcagggatctccactatgtatgttttcactttagaactgttgagcccatgcttaattttaatctagaagtctttaaatggtgagacagtgactggagcatgccaatcagagagcatttgtcttcagaaaaaaaaaaaatctgagtttgagactagcctggccaacatgttgaaaccccatatctactaaaaatacaaaaattagcctggtgtggtggcgcacgcctgtagtcccagctactctggagcctgaggaacgtgaatcgcttgaacccagaagacagaggttgcagtgagctgagatggcactattgcactccagactggtgacacacgcaga

SEQ ID NO: 257 - DNA, 446 bp, Homo sapiens
  misc_feature: Incyte ID No: 221653.4
ataattcacttgttgttactacaacaaaaccatctataacaacaccaaacacagaatcattacagaaaaatgttgtcacaccaacaactggaacaactcctaaaggaacaatcaccaatgaattacttaaaatgtctctgatgtcaacagctacttttttaacaagtaaagatgaaggattgaaagccacaaccactgatgtcaggaagaatgactccatcatttcaaacgtaacagtaacaagtgttacacttccaaatgctgtttcaacattacaaagttccaaacccaagactgaaactcagagttcaattaaaacaacagaaataccaggtagtgttctacaaccagatgcatcaccttctaaaactgggtacattaacctcaataccagtttacaattccagaaaacacctaacagtctcaagtaataggcactgagggtg

SEQ ID NO: 258 - DNA, 1877 bp, Homo sapiens
  misc_feature: Incyte ID No: 1398165.2
cctcccagagtgctgggattacaggcgtgagccagtgcacccggcggaatcttggaatttttatagacagcacctcagtttctgactccagccgcacacctcctgcctctaccagcaggggttgccgccagaccagagccagggccaggtccctgcgtccatcccccccggtaggatggacgtgagccatccttctaggggacttttttcagtgtgcgactcgtctctgttaggtggtaggagccagtttgtgtggcctgtgccacgctccacagtgcgtggctgggctctgtgtgtggcctgtgtcccctgtccctgcaggacccagcaggcatcgtggcgtgacagctgtgtccaagccactgcccgggcatcccatcacccaccagggtgcacggtctctcctgctgggggctttctgtcgcatgtgtgtctcctgtcgactctgcagtttgttctcagagcagaatgtttcctgttctcagtgcacaaagacactggttttcaatcggcgtctaaaaccacgttcctgcctttcattgcaacacggtgtgttcatttgtttaaaacagtttaatgagtaagtttagatgactggtcaatatcttaaaaatgtatattagtaagaagttcttcctggaatttttctttcgattctggcagaataaacaggtgtttttagttttcccactgtctgagccaagcaggaccctgtcccagagcaagagatgtccccttccatctctgacccttggcctgggacaagctttgatggggggccccagcttcaaggctgtggtgggaacagcacccccaaatgccagcctctcctttcttcccatccaccagtatactgcggggccatttctggtctttgtccaacaggaaacccatttctggtgggatatgccttccagtgccacagggccactcaccccatgcatctctgtcctgcccgtcagtgctgggacggacagcaagggcaagcccagtgtctggcggataggtgggtgggaacagagaggggagaatgccgtcctaagcttctgcttggggatcccccacacgacctgggtactgcctgggaaacctgtcctaagtaaaactatggacctcgcctcgcccaccggcctgcgaagccagcatctccgtgaaggtggatggaagcgcctttgtcctcattttgagctgcaagctgggtcagcggctctgaagccctcgagtgactttctaacccaagacccagcccctggcaggaggagggtgggtgcagggctggtgggacaaaaagaggcctcagcaggcctggaagacccttccagtacatcccacagcgtgtcgagcagctgggagaacctgtgtcaagctcgagccgtcataggtccccatgaggtgtctgaagccccttcttggtgatgggaggcagaggtgctgacgttctggagcatggacgtgagtcctcagctggctccgcgtgggcccttggagggtgccaggtgtgtggtgaccttctggatgcctttaacttcatggctgcgtcattcctgatttagaactttaaccggagcttcatctagtgattgcaaaactggaccaatgggaggacggcggcgcagcccgctccctccgtggaatggagctcagctcttcggaggcatcaaagcacctgtcgcctccgtggtccccctgccgagggagtgcggcctctgcaaggttcgggggtggcttcgtttgcctggagtggccggccctgcttgtgccatgtggatgtttgtgagcctcggtcctacagcactgtgtaggctgcatctgtttcgtgctggtcctgttgacttgtatgatatccacaaataaatattttcatggcggtaaaaaaa

SEQ ID NO: 259 - DNA, 631 bp, Homo sapiens
  misc_feature: Incyte ID No: 900086.1
tttagaattcagcataggttgaggtcagaaagccatttaccatgagccaccgtgcccggcttcacacccatttctttaaaaaggatcccgtagcaggcagaaaagccccttccatcctgctcctctgatactgtgcccccttggagatatttccgtcctccacccacgtgtctgtggctggaactgcccagcctgctcctggccccctggaagcctccccacagctggtaatctggacttaaggattgctgggccaccgcctctctgcctaccaccattccatatttaagtggagcccctacgtagaaaggccccggggctttattttagtctccttttcagggatgtcgtgggcgggggagggggttcttggtgctacagccctctccccacccctaaagggacgccgacgctgtttgctgccttcaccacatattagtgcttgaccctggcaggggaccccatggaaaagatggggaagagcaaaatacatggagacgacgcaccctccaggatgctcgctgggattcccacgcccaccactgtcccccaccccatggctgggaggggcctctgaacggaacagtgtccccacagagcgaataaagccaaggcttcttcccaaaaaaaa

SEQ ID NO: 260 - DNA, 2154 bp, Homo sapiens
  misc_feature: Incyte ID No: 361583.16
  unsure 2106, 2150: a, t, c, g, or other
gccaccgccgcgcctcggcctcggtgcaggcagcggccgccgccgccgagacagctgcgcgggcgagcatccccacgcagcaccttggaagttgttttcaaccatatccagcctttgccgaatacatcctatctgccacacatccagcgtgaggtccctccagctacaaggtgggcaccatggcggagaagtttgactgccactactgcagggatcccttgcaggggaagaagtatgtgcaaaaggatggccaccactgctgcctgaaatgctttgacaagttctgtgccaacacctgtgtggaatgccgcaagcccatcggtgcggactccaaggaggtgcactataagaaccgcttctggcatgacacctgcttccgctgtgccaagtgccttcaccccttggccaatgagacctttgtggccaaggacaacaagatcctgtgcaacaagtgcaccactcgggaggactcccccaagtgcaaggggtgcttcaaggccattgtggcaggagatcaaaacgtggagtacaaggggaccgtctggcacaaagactgcttcacctgtagtaactgcaagcaagtcatcgggactggaagcttcttccctaaaggggaggacttctactgcgtgacttgccatgagaccaagtttgccaagcattgcgtgaagtgcaacaaggccatcacatctggaggaatcacttaccaggatcagccctggcatgccgattgctttgtgtgtgttacctgctctaagaagctggctgggcagcgtttcaccgctgtggaggaccagtattactgcgtggattgctacaagaactttgtggccaagaagtgtgctggatgcaagaaccccatcactgggaaaaggactgtgtcaagagtgagccacccagtctctaaagctaggaagcccccagtgtgccacgggaaacgcttgcctctcaccctgtttcccagcgccaacctccggggcaggcatccgggtggagagaggacttgtccctcgtgggtggtggttctttatagaaaaaatcgaagcttagcagctcctcgaggcccgggtttggtaaaggctccagtgtggtggcctatgaaggacaatcctggcacgactactgcttccactgcaaaaaatgctccgtgaatctggccaacaagcgctttgttttccaccaggagcaagtgtattgtcccgactgtgccaaaaagctgtaaactgacaggggctcctgtcctgtaaaatggcatttgaatctcgttctttgtgtccttctttctgccctataccatcaataggggaagagttccttcccttctttaaagttcctcccttccgtcttttctcccattttacagtattactcaaataagggcacacagtgatcatattagcatttagcaaaaagcaaccctgcagcaaagtgaatttctgtccggctgcaatttaaaaatgaaaacttaggtagattgactcttctgcatgtttctcatagagcagaaaagtgctaatcatttagccacttagtgatgtaagcaagaagcataggagataaaacccccactgagatgcctctcatgcctcagctgggacccaccgtgtagacacacgacatgcaagagttgcagcggctgctccaactcactgctcaccctcttctgtgagcaggaaaagaaccctactgacatgcatgggttaacttcctcatcagaactctgcccttccttctgttcttttgtgctttcaaataactaacacgaacttccagaaaattaacatttgaacttagctgtaattctaaactgacctttccccgtactaacgtttggtttccccgtgtggcatgttttctgagcgttcctactttaaagcatggaacatgcaggtgatttgggaagtgtagaaagacctgagaaaacgagcctgtttcagaggaacatcgtcacaacgaatacttctggaagcttaacaaaactaaccctgctgtcctttttattgtttttaattaatatttttgttttaattgatagcaaaatagtttatgggtttggaaacttgcatgaaaatattttagccccctcagatgttcctggcagtgctnaaattcatcctacagaagtaaccggcaaaactctagaggggganttga

SEQ ID NO: 261 - DNA, 763 bp, Homo sapiens
  misc_feature: Incyte ID No: 243902.21
gagaaaccagtccccgaaccaaaatcacgtggatgaaagcagaagactcatctaaagttagtggtggaacaccttattaaaatttgaagatcccaaatcagtttgttcctttaaacacaaacccgaatgaggtactaggaaacagagaaataccgattcggcgaacaaaattcgatatgacttggaaaacagcaggaccacaatctcagttgcttgctggaattgttgtggataagccaccttctactatgcaatttgaagatgatgatcatggcccaccagctcctcctaacccatttagtcatctcacagaaggagaacttgaagagtataagaggacaatcgaacgtaaacaacaaggcctagaagatgctgagcaggaattactctcagatgacgcttcatctgtttcacaaattcagtctcaaactcagtcaccgcaaaatgtccctgaaaaattagaagaaaaccatgagctgttttccaagagcttcatctccatggaagtgcctgtcatggtagtaaatggcaaggatgatatgcatgatgttgaagatgagcttgctaagcgagtgagtaggttaagcacaagtacaaccatagaaaacatcgagattactattaagtctccagagaaaatcgaagaagtcctgtcacctgaaggctccccttcaaaatcgccatccaagaaaaagaagaaattccgcactccttcttttctgaaaaagaacaaaaaaaaaggagaaagttgaggcctaaataa

SEQ ID NO: 262 - DNA, 575 bp, Homo sapiens
  misc_feature: Incyte ID No: 1327111.3
agctggaacgtctgaggttatcaataagctcctagtccagacgccatgggtcatttcacagaggaggacaaggctactatcacaagcctgtggggcaaggtgaatgtggaagatgctggaggagaaaccctgggaaggctcctggttgtctacccatggacccagaggttctttgacagctttggcaacctgtcctctgcctctgccatcatgggcaaccccaaagtcaaggcacatggcaagaaggtgctgacttccttgggagatgccataaagcacctggatgatctcaagggcacctttgcccagctgagtgaactgcactgtgacaagctgcatgtggatcctgagaacttcaagctcctgggaaatgtgctggtgaccgttttggcaatccatttcggcaaagaattcacccctgaggtgcaggcttcctggcagaagatggtgactggagtggccagtgccctgtcctccagataccactgagctcactgcccatgatgcagagctttcaaggataggctttattctgcaagcaatcaaataataaatctattctgctaagagatcac

SEQ ID NO: 263 - DNA, 1721 bp, Homo sapiens
  misc_feature: Incyte ID No: 398670.38
ggaattccagctgcgactgctgagggagaaaatgatgcccaggttgggctccccggcccaccggccgaggagaggcctgcgctgcacacgcgcagaccgagcatccgcgtcaagaggcgaagagagcgcgcgctccccacgtcctgcgctcctggctgccgggcattcgtctcagccgtgactctcgccaggccggggctggcgcgcccacgtctgaagagcgatgccccgggagatcatcaccctgcagctgggccagtgcggcaaccagattgggttcgagttctggaaacagctgtgcgccgagcatggtatcagccccgagggcatcgtggaggagttcgccaccgagggcactgaccgcaaggacgtctttttctaccaggcagacgatgagcactacatcccccgggccgtgctgctggacttggaaccccgggtgatccactccatcctcaactccccctatgccaagctctacaacccagagaacatctacctgtcggaacatggaggaggagctggcaacaactgggccagcggattctcccagggtgagaaaattcatgaagacatctttgacatcatagaccgagaagcagatggaagtgacagtttggagggcttcgtgctgtgtcactccatcgctgggggtacgggttctggcctgggctcctacctcctggagcgactgaatgacaggtaccccaagaagctagtgcagacttattcagtgtttccctaccaggacgagatgagcgacgtagtggttcagccctacaattcactcctgacactcaagaggctgacgcagaacgcagattgtgtggtggtgctggacaacacagccctgaaccggattgccacagaccgcctgcacatccagaacccgtccttctcccagatcaaccagctggtgtccaccatcatgtcggccagcaccaccaccctgcgctaccccggctacatgaacaatgacctcatcggcctcatcgcctcgctcattcccaccccacggctccacttcctcatgaccggctacaccccgctcactacagaccagtcagtggccagcgtgaggaagaccacggtcctggatgtcatgaggcggctgctgcagcccaagaacgtgatggtgtccacaggccgagaccgccagaccaaccactgctacatcgccatcctcaacatcatccagggagaggtggaccccaccccaggtccacaagagcctgcagaggatccgggaacggaagttggccaacttcatcccgtggggccccgccagcatccaggtggccctgtcgaggaagtctccctacctgccctcagcccaccgggtcagcgggctcatgatggccaaccacaccagcatctcctcgctctttgaaagttcctgccagcagtttgacaagctgcggaagcgggatgccttcctcgagcagttccgtaaggaggacgtgttcaaggacaactttgatgagatggacaggtctagggaggttgttcaggagctctttgatgagtaccatgcggccacccagccagactacatttcctggggcacccaggagcagtgatttccctccccactactccttctccttctagatggtaaccacagcctcgaccatgcctgctccctctgacccagcttcacctcatggacaacccttcttggttcatctccagcccgtgagctggtcctgcttcctcccttc

SEQ ID NO: 264 - DNA, 1812 bp, Homo sapiens
  misc_feature: Incyte ID No: 398670.33
aagcttacgaggaattcttggatgacatccctcagcatgtctgagcgactgctgagggagaaaatgatgcccaggttggtccccggcccaccgcagagaggcctgcgctgcacacgcgcagaccgagcatccgcgtcaagaggcgaagagagcgcgcgctccccacgtcctgcgctcctggctgccgggcattgcgtctcagccgtgactctcgccaggccggggctggcgcgcccagcgtctgaagagcgatgccccgggagatcatcaccctgcagctgggccagtgcggcaaccagattgggttcgagttctggaaacagctgtgcgcccgagcatggtatcagccccgagggcatcgtggaggagttcgccaccgagggcactgaccgcaaggacgtctttttctaccaggcagacgatgagcactacatcccccgggccgtgctgctggacttggaaccccgggtgatccactccatcctcaactccccctatgccaagctctacaacccagagaacatctacctgtcggaacatggaggaggagctggcaacaactgggccagcggattctcccagggtgagaaaattcatgaagacatctttgacatcatagaccgagaagcagatggaagtgacagtttggagggcttcgtgctgtgtcactccatcgctgggggtacgggttctggcctgggctcctacctcctggagcgactgaatgacaggtaccccaagaagctagtgcagacttattcagtgtttccctaccaggacgagatgagcgacgtagtggttcagccctacaattcactcctgacactcaagaggctgacgcagaacgcagattgtgtggtggtgctggacaacacagccctgaaccggattgccacagaccgcctgcacatccagaacccgtcctttcccagatcaaccagctggtgtccaccatcatgtcggcagcaccaccaccctgcgctaccccggctacatgaacaatgacctcatcggcctcatcgcctcgctcattcccaccccacggctccactttctcatgaccggctacaccccgctcactacagaccagtcagtggccagcgtgaggaagaccacggtcctggatgtcatgaggcggctgctgcagcccaagaacgtgatggtgtccacaggccgagaccggccagaccaaccactgctacatcgccatcctcaacatcatccagggagaggtggaccccacccaggtccacaagagcctgcagaggatccgggaacggaagttggccaacttcatcccgtggggccccgccagcatccaggtggccctgtcgaggaagtctccctacctgccctcggcccaccgggtcagcgggctcatgatggccaaccacaccagcatctcctcgctctttgaaagttcctgccagcagtttgacaagctgcggaagcgggatgccttcctcgagcagttccgtaaggaggacatgttcaaggacaactttgatgagatggacaggtctagggaggttgttcaggagctcattgatgagtaccatgcggccacccagccagactacatttcctggggcacccaggagcagtgatttccctccccactactccttctccttctagatggtaaccacagcctcgaccatgcctgctccctctgacccagcttcacctcatggacaacccttcttggttcatctccagcccgtgagctggtcctgcttcctcccttccatgccctaacttttaatatgcttgttcagctctaataaagtaataaagcttggttgtcagtat

SEQ ID NO: 265 - DNA, 12184 bp, Homo sapiens
  misc_feature: Incyte ID No: 055784.8
  unsure 9523, 9542: a, t, c, g, or other
ccccagcctccttgccaacgccccctttccctctccccctcccgctcggcgctgaccccccatccccacccccgtgggaacactgggagcctgcactccacagaccctctccttgcctcttccctcacctcagcctccgctccccgccctcttcccggcccagggcgccggcccacccttccctccgccgccccccggccgcggggaggacatggccgcgcacaggccggtggaatgggtccaggccgtggtcagccgcttcgacgagcagcttccaataaaaacaggacagcagaacacacataccaaagtcagtactgagcacaacaaggaatgtctaatcaatatttccaaatacaagttttctttggttataagcggcctcactactattttaaagaatgttaacaatatgagaatatttggagaagctgctgaaaaaaatttatatctctctcagttgattatattggatacactggaaaaatgtcttgctgggcaaccaaaggacacaatgagattagatgaaacgatgctggtcaaacagttgctgccagaaatctgccattttcttcacacctgtcgtgaaggaaaccagcatgcagctgaacttcggaattctgcctctggggttttattttctctcagctgcaacaacttcaatgcagtctttagtcgcatttctaccaggttacaggaattaactgtttgttcagaagacaatgttgatgttcatgatatagaattgttacagtatatcaatgtggattgtgcaaaattaaaacgactcctgaaggaaacagcatttaaatttaaagccctaaagaaggttgcgcagttagcagttataaatagcctggaaaaggcattttggaactgggtagaaaattatccagatgaatttacaaaactgtaccagatcccacagactgatatggctgaatgtgcagaaaagctatttgacttggtggatggttttgctgaaagcaccaaacgtaaagcagcagtttggccactacaaatcattctccttatcttgtgtccagaaataatccaggatatatccaaagacgtggttgatgaaaacaacatgaataagaagttatttctggacagtctacgaaaagctcttgctggccatggaggaagtaggcagctgacagaaagtgctgcaattgcctgtgtcaaactgtgtaaagcaagtacttacatcaattgggaagataactctgtcattttcctacttgttcagtccatggtggttgatcttaagaacctgctttttaatccaagtaagccattctcaagaggcagtcagcctgcagatgtggatctaatgattgactgccttgtttcttgctttcgtataagccctcacaacaaccaacactttaagatctgcctggctcagaattcaccttctacatttcactatgtgctggtaaattcactccatcgaatcatcaccaattccgcattggattggtggcctaagattgatgctgtgtattgtcactcggttgaacttcgaaatatgtttggtgaaacacttcataaagcagtgcaaggttgtggagcacacccagcaatacgaatggcaccgagtcttacatttaaagaaaaagtaacaagccttaaatttaaagaaaaacctacagacctggagacaagaagctataagtatcttctcttgtccatggtgaaactaattcatgcagatccaaagctcttgctttgtaatccaagaaaacaggggcccgaaacccaaggcagtacagcagaattaattacagggctcgtccaactggtccctcagtcacacatgccagagattgctcaggaagcaatggaggctctgctggttcttcatcagttagatagcattgatttgtggaatcctgatgctcctgtagaaacattttgggagattagctcacaaatgcttttttacatctgcaagaaattaactagtcatcaaatgcttagtagcacagaaattctcaagtggttgcgggaaatattgatctgcaggaataaatttcttcttaaaaataagcaggcagatagaagttcctgtcactttctccttttttacggggtaggatgtgatattccttctagtggaaataccagtcaaatgtccatggatcatgaagaattactacgtactcctggagcctctctccggaagggaaaagggaactcctctatggatagtgcagcaggatgcagcggaacccccccaatttgccgacaagcccagaccaaactagaagtggccctgtacatgtttctgtggaaccctgacactgaagctgttctggttgccatgtcctgtttccgccacctctgtgaggaagcagatatccggtgtggggtggatgaagtgtcagtgcataacctcttgcccaactataacacattcatggagtttgcctctgtcagcaatatgatgtcaacaggaagagcagcacttcagaaaagagtgatggcactgctgaggcgcattgagcatcccactgcaggaaacactgaggcttgggaagatacacatgcaaaatgggaacaagcaacaaagctaatccttaactatccaaaagccaaaatggaagatggccaggctgctgaaagccttcacaagaccattgttaagaggcgaatgtcccatgtgagtggaggaggatccatagatttgtctgacacagactccctacaggaatggatcaacatgactggcttcctttgtgcccttgggggagtgtgcctccagcagagaagcaattctggcctggcaacctatagcccacccatgggtccagtcagtgaacgtaagggttctatgatttcagtgatgtcttcagagggaaacgcagatacacctgtcagcaaatttatggatcggctgttgtccttaatggtgtgtaaccatgagaaagtgggacttcaaatacggaccaatgttaaggatctggtgggtctagaattgagtcctgctctgtatccaatgctatttaacaaattgaagaataccatcagcaagttttttgactcccaaggacaggttttattgactgataccaatactcaatttgtagaacaaaccatagctataatgaagaacttgctagataatcatactgaaggcagctctgaacatctagggcaagctagcattgaaacaatgatgttaaatctggtcaggtatgttcgtgtgcttgggaatatggtccatgcaattcaaataaaaacgaaactgtgtcaattagttgaagtaatgatggcaaggagagatgacctctcattttgccaagagatgaaatttaggaataagatggtagaatacctgacagactgggttatgggaacatcaaaccaagcagcagatgatgatgtaaaatgtcttacaagagatttggaccaggcaagcatggaagcagtagtttcacttctagctggtctccctctgcagcctgaagaaggagatggtgtggaattgatggaagccaaatcacagttatttcttaaatacttcacattatttatgaaccttttgaatgactgcagtgaagttgaagatgaaagtgcgcaaacaggtggcaggaaacgtggcatgtctcggaggctggcatcactgaggcactgtacggtccttgcaatgtcaaacttactcaatgccaacgtagacagtggtctcatgcactccataggcttaggttaccacaaggatctccagacaagagctacatttatggaagttctgacaaaaatccttcaacaaggcacagaatttgacacacttgcagaaacagtattggctgatcggtttgagagattggtggaactggtcacaatgatgggtgatcaaggagaactccctatagcgatggctctggccaatgtggttccttgttctcagtgggatgaactagctcgagttctggttactctgtttgattctcggcatttactctaccaactgctctggaacatgttttctaaagaagtagaattggcagactccatgcagactctcttccgaggcaacagcttggccagtaaaataatgacattctgtttcaaggtatatggtgctacctatctacaaaaactcctggatcctttattacgaattgtgatcacatcctctgattggcaacatgttagctttgaagtggatcctaccaggttagaaccatcagagagccttgaggaaaaccagcggaacctccttcagatgactgaaaagttcttccatgccatcatcagttcctcctcagaattcccccctcaacttcgaagtgtgtgccactgtttataccaggtggttagccagcgtttccctcagaacagcatcggtgcagtaggaagtgccatgttcctcagatttatcaatcctgccattgtctcaccgtatgaagcagggattttagataaaaagccaccacctagaatcgaaaggggcttgaagttaatgtcaaagatacttcagagtattgccaatcatgttctcttcacaaaagaagaacatatgcggcctttcaatgattttgtgaaaagcaactttgatgcagcacgcaggtttttccttgatatagcatctgattgtcctacaagtgatgcagtaaatcatagtctttccttcataagtgacggcaatgtgcttgctttacatcgtctactctggaacaatcaggagaaaattgggcagtatctttccagcaacagggatcataaagctgttggaagacgaccttttgataagatggcaacacttcttgcatacctgggtcctccagagcacaaacctgtggcagatacacactggtccagccttaaccttaccagttcaaagtttgaggaatttatgactaggcatcaggtacatgaaaaagaagaattcaaggctttgaaaacgttaagtattttctaccaagctgggacttccaaagctgggaatcctattttttattatgttgcacggaggttcaaactggtcaaatcaatggtgatttgctgatataccatgtcttactgactttaaagccatattatgcaaagccatatgaaattgtagtggaccttacccataccgggcctagcaatcgctttaaaacagactttctctctaagtggtttgttgtttttcctggctttgcttacgacaacgtctccgcagtctatatctataactgtaactcctgggtcagggagtacaccaagtatcatgagcggctgctgactggcctcaaaggtagcaaaaggcttgttttcatagactgtcctgggaaactggctgagcacatagagcatgaacaacagaaactacctgctgccaccttggctttagaagaggacctgaaggtattccacaatgctctcaagctagctcacaaagacaccaaagtttctattaaagttggttctactgctgtccaagtaacttcagcagagcgaacaaaagtcctagggcaatcagtctttctaaatgacatttattatgcttcggaaattgaagaaatctgcctagtagatgagaaccagttcaccttaaccattgcaaaccagggcacgccgctcaccttcatgcaccaggagtgtgaagccattgtccagtctatcattcatatccggacccgctgggaactgtcacagcccgactctatcccccaacacaccaagattcggccaaaagatgtccctgggacactgctcaatatcgcattacttaatttaggcagttctgacccgagtttacggtcagctgcctataatcttctgtgtgccttaacttgtacctttaatttaaaaatcgagggccagttactagagacatcaggtttatgtatccctgccaacaacaccctctttattgtctctattagtaagacactggcagccaatgagccacacctcacgttagaatttttggaagagtgtatttctggatttagcaaatctagtattgaattgaaacacctttgtttggaatacatgactccatggctgtcaaatctagttcgtttttgcaagcataatgatgatgccaaacgacaaagagttactgctattcttgacaagctgataacaatgaccatcaatgaaaaacagatgtacccatctattcaagcaaaaatatggggaagccttgggcagattacagatctgcttgatgttgtactagacagtttcatcaaaaccagtgcaacaggtggcttgggatcaataaaagctgaggtgatggcagatactgctgtagctttggcttctggaaatgtgaaattggtttcaagcaaggttattggaaggatgtgcaaaataattgacaagacatgcttatctccaactcctactttagaacaacatcttatgtgggatgatattgctattttagcacgctacatgctgatgctgtccttcaacaattcccttgatgtggcagctcatcttccctacctcttccacgttgttactttcttagtagccacaggtccgctctcccttagagcttccacacatggactggtcattaatatcattcactctctgtgtacttgttcacagcttcattttagtgaagagaccaagcaagttttgagactcagtctgacagagttctcattacccaaattttacttgctgtttggcattagcaaagtcaagtcagctgctgtcattgccttccgttccagttaccgggacaggtcattctctcctggctcctatgagagagagacttttgctttgacatccttggaaacagtcacagaagctttgttggagatcatggaggcatgcatgagagatattccaacgtgcaagtggctggaccagtggacagaactagctcaaagatttgcattccaatataatccatccctgcaaccaagagctcttgttgtctttgggtgtattagcaaacgagtgtctcatgggcagataaagcagataatccgtattcttagcaaggcacttgagagttgcttaaaaggacctgacacttacaacagtcaagttctgatagaagctacagtaatagcactaaccaaattacagccacttcttaataaggactcgcctctgcacaaagccctcttttgggtagctgtggctgtgctgcagcttgatgaggtcaacttgtattcagcaggtaccgcacttcttgaacaaaacctgcatactttagatagtctccgtatattcaatgacaagagtccagaggaagtatttatggcaatccggaatcctctggagtggcactgcaagcaaatggatcattttgttggactcaatttcaactctaactttaactttgcattggttggacaccttttaaaagggtacaggcatccttcacctgctattgttgcaagaacagtcagaattttacatacactactaactctggttaacaaacacagaaattgtgacaaatttgaagtgaatacacagagcgtggcctacttagcagctttacttacagtgtctgaagaagttcgaagtcgctgcagcctaaaacatagaaagtcacttcttcttactgatatttcaatggaaaatgttcctatggatacatatcccattcatcatggtgacccttcctataggacactaaaggagactcagccatggtcctctcccaaaggttctgaaggataccttgcagccacctatccaactgtcggccagaccagtccccgagccaggaaatccatgagcctggacatggggcaaccttctcaggccaacactaagaagttgcttggaacaaggaaaagttttgatcacttgatatcagacacaaaggctcctaaaaggcaagaaatggaatcagggatcacaacaccccccaaaatgaggagagtagcagaaactgattatgaaatggaaactcagaggatttcctcatcacaacagcacccacatttacgtaaagtttcagtgtctgaatcaaatgttctcttggatgaagaagtacttactgatccgaagatccaggcgctgcttcttactgttctagctacactggtaaaatataccacagatgagtttgatcaacgaattctttatgaatacttagcagaggccagtgttgtgtttcccaaagtctttcctgttgtgcataatttgttggactctaagatcaacaccctgttatcattgtgccaagatccaaatttgttaaatccaatccatggaattgtgcagagtgtggtgtaccatgaagaatccccaccacaataccaaacatcttacctgcaaagttttggttttaatggcttgtggcggtttgcaggaccgttttcaaagcaaacacaaattccagactatgctgagcttattgttaagtttcttgatgccttgattgacacgtacctgcctggaattgatgaagaaaccagtgaagaatccctcctgactcccacatctccttaccctcctgcactgcagagccagcttagtatcactgccaaccttaacctttctaattccatgacctcacttgcaacttcccagcattccccaggaatcgacaaggagaacgttgaactctcccctaccactggccactgtaacagtggacgaactcgccacggatccgcaagccaagtgcagaagcaaagaagcgctggcagtttcaaacgtaatagcattaagaagatcgtgtgaagcttgcttgctttcttttttaaaatcaacttaacatgggctcttcactagtgaccccttccctgtccttgccctttccccccatgttgtaatgctgcacttcctgttttataatgaacccatccggtttgccatgttgccagatgatcaactcttcgaagccttgcctaaatttaatgctgccttttctttaactttttttcttctacttttggcgtgtatctggtatatgtaagtgttcagaacaactgcaaagaaagtgggaggtcaggaaacttttaactgagaaatctcaattgtaagagaggatgaattcttgaatactgctactactggccagtgatgaaagccatttgcacagagctctgccttctgtggttttcccttcttcatcctacagagtaaagtgttagtcctatttatacatttttcaagatacaagtttatgagagaaatagtattataaccccagtatgtttaatcttttagctgtggactttttttttaaccgtacaaaactgaaagaaccatagaggtcaagcctcagtgacttgacaccataaagccacagacaaggtacttgggggggagggcagggaaatttcatattttatagtggattcttaagaaatactaacacttgagtattagcaataattacaggaaaataagtgcgaccacatatatcttaacattactgaattaaaactatggcttctaagtccttatccaaactcagtcatccaaactagtttatttttttctccagttgattatcttttaatttttaattttgctaaaggtggtttttttgtgttttgttttttgtaaaccaaaactatactaagtatagganttatatatatatatatatnttttcccctccccctcttctttcctaactaattctgagcagggtaatcagtgaacaaagtgttgaaaattgttcccagaaggtaattttcatagatgtttgcattagctccatagcaaaatggaatggtacgtgacatttagggtagctgatatttttattttgttaaataatttccaagaatagagtatggtgtatattataaatttctttgataagatgtattttgaatgtcttttaatcttcctcctcctctccaaaaaaatcagaaacctctttaagaaaacatgtaggttatatatgctagaattgcatttaatcactgtgaaaagactggtcagcctgcattagtatgacagtaggggggctgttagaattgctgctatactggtggtatggattatcatggcattggaattttcatagtaatgcagatccaatttctttgtggtacctgcagtttacaaaataatttgacttcagtgagcatattggtatctggatgttccaatttagaactaaaccatatttattacaaaaagatattaatccctctactcccaggttccctttatatgttaagatataatggctttgaggggggaaaaaataaacctaggggagaggggagtttcctgtagtgctgtttcattagaggatttcagtaaattaaattccacagctaattcaataaataatggtacatttaagtgttctgattttaataatatatttcacatttatccacacagtaacaatgtaatatgttaatgtaaataaaattggttttgatactcagaaataacaagaatttaattttttaaatttgtttacagtcctgggaaaagtaagaattatttgccaaaataagaggaaagaaaaccttagtattattaatgagtttaccatagaattgttggaaatactgaagacaggtgcaatttactaaacttttgtttttaaactattgtagaggctgcattagaagaaaatgtttataatgacagagcaactatgactatataaaaaagctgaaattagaactgtgtttagaaatagatcagtaacccagtgccaaggatgccaagctgccaccatggtcttggctctcccacaacccagtgtttctggggtaagtttcacagtttctaggccctggaatagcaggcagtgtaagcctttgataactttagttcgatgtttttcttgtttttgtttgttggtttggtgcatatgatagtgggtgttatgctattttgctcttcccatcaaaataaagaaacttccagaggtttactgttaaaaatactgatatttccataaacgagtttaccaagggtgtagtatttcataccgcctgaaatgatcagcattggcacaaatcaaaattcagccgcctttgaaatgcaaaaatacctttgactagtaagtacatcctaggagtttgaaaacttaactaaggtttaaaatttaccttgtttaaagaacttctgacttttgaggaaaatctagctttccaagtaactaaaatgtacatgagataaacctctcaccactatgtggtcccttgagaaatgcaacacttttttagtcttcatacttgtaatctataaaagaaattctgaagtttagaccaagttgcccatttctgcgtaattgacataagttctgttaaaaatattataagtaattcgtttcggtttgtagatgtttcccctgacttgttaaagaggaaaccaggaactcagtcatgtttttgtcctggataatctacctgttatgccagtactcccatccgaggggcatgcccttagttgcccagatggagatgcagttcagtagatttggggcaaagtggctacagctctgtcttccattcactcaacacctgttcatgactgagccaggtgcccaggacacatcctaaacagtcagcttctatcctgtgtcctagtcggggagacagagtgccagccagcaaccctcccaggtttgtaggttttaggggttttcagttttgtttgggttttttgttttttgtttttgtttctacatccttccccgactcccaggcataatgaggcatgtcttactcaatgttatgcaatggatttaggcaaaaattcattcttagtgtcagccacacaattttttttaatgcagtatattcacctgtaaatagtttgtgtaaaatttgacaaaaaaagtatatttactatactgtaaatatatgtgatgatatattgtattattttgcttttttgtaaagcagttagttgctgcacatggataacaacaaaaatttgattattctcgtgttagtattgttaacttctttttgcgactgcgttacatcatttaaagaaaatgctgtgtattgtaaacttaaattgtatatgataacttactgtcctttccatccgggcctaaactttggcagttcctttgtctacaaccttgttaatactgtaaacagttgtacgccagcaggaaaaatactgcccaacagacaaaatcgatcattgtaggggaaaatcatagaaatccatttcagatctttattgttcctcaccccattttcctccttgtgtatgtacttcccccacccccctttttttaagtaaaatgtaaattcaatctgct

SEQ ID NO: 266 - DNA, 2712 bp, Homo sapiens
  misc_feature: Incyte ID No: 236719.3
ggggcccctgttctctccagcttgaactcacctcatacaagggactcctaagctcctacttgaaccacaagcacctaagaaaatagaagagtttctgccttctagagctctggcctgaggcttggtggtggggccatgtgtttggtttttaagtagcccctcgagaccctccagcaccccttccctgcctcccctggaccagtgatccaccctgggtctgagggcatctgctgccctctaagaacgaggggccacgtccagggagagccctcctgtgggctgatgtcccacttggggagagactggatccacactggaaaatgcactagttaaattggaggtagcacaatcatttgtctggatttgtaggctggcgttgagccctcaaacatgtgaagggcacggagttaaagctctgggtccggcgaggagccaaggctgaggcagtgatgttggtggaaagccctgggccccggccaggcctggcctccaaggggctcccagtggggtgcggctgtcctgtgacagcctcttcagaccccagggctggcgccagaggaagtgctcacctggctttagagtcacctgagaagctcgcaggtccacccactgggccacccgcattatggtcctcttgtctttatttcctttttcccactgtggacatttcatgattggattaattttagtctaaacgtgacttgaacccagaagtagttcaggctgcatctctcccaaaagccttgttttcagggcagctcctggttcttcgtgggccctcatcagacagccctgcccacatcagacagccctgcccacaggagcccaggcctccggctgagcatgcaagccccgctgctcttgcagggaggccaccccagggaaggtgctgtggggagagagccacccgcccaggccttgcgggccaggtcctcatggtgcccacggcgcgggccgccctgtgcctgctccagtaacaggtgggctcacctttgttttggtgcagttcctgatccgcctcatacacaaggagctgagctgcccagggtcagctacgggggaccaagttccgtaagtcccactcgggccctgtctccgtgcgtgaaagccggctccaaagtgccttctgtcctatctgccttccgcacctggctttcctgaaagaaagaaaacgcgtggcttatcttttcacggcacgccaccttcactctcgctttttctttgctaataaatacctccggatgggttagtggtaatctctcctcaaaccctgagtggaaaatgtgagggaattgccgtctttggcattctgttggagctgcagccccccgagctctccttgccttcctgctcgcccccttctccctccctcctcttttccctccccccttggtcctccctcgctcccttctcacttcttcctggcccccagaaggctgcgggaaaggtgcaagggtttatccagcatccagcacccctgcaggagaggaatccctgctgggccgggagggcagctggctccccataggatttgcacatggtgtgtgaagttcagcatctcttgctgagccactgctggctgttagagcagctcttctttcaacctttctttcagatttaaggaacagtgacaccccaccccagtcccgtggagggggtctgggcccacccttcacaactgcctttcaaggacagttcagacaaagggccctgcatggaaagagtgacctccctttgccttttgcacacgcacctggaaaagacacagaagccaacctgagaacccctggtgctattttaaaggagacatattgctgaacagcagtgagaaaagtctgcaggaactgctgcctgagccaagccagagaaccgaagacccggccggccctggcctcacaggcgtgtgcccatgcagccacccaaatgcacgcgtgacaacaaggccgggagggtgggggggggtgcacaggtagccccgaccctctcaggcattccagccacagaacatcaaagtgagcgagtactgcgctggctgtggcttcagagaacctgtatgtgccacgtggaaaaacaggacaccagagcccaccagacagtgccggccagcagagaagcagagagccagcgccacacaacatcaagaaggccgacaaccaggttggaaaccaagacggagctcagacccaccacatcgccccagaggcttttccagcacccatgatgttccggactgacctaaaaactaattgtcgagaagccaagggtgaggaggcaggaagcacctccggttggaggcacccaggcttgccagccacagagcgccccgaagtcaccgtcatcccagcccctggccttcctgctgccctccggggccatggcactgctgttcagctcaggcacaggggcacagcagaggtttgggaagcggtctccccaccggcactgggattggcgggtccaagcccagcaaccggcttcgctccacaacacacaccacacctgggactgtttttaatacatagcaacagactgggttatttatttaagatgtgtattgtgtcatatgaagtttaagagacataaatggcattttgttatttattaagacaaactccaattgttctctggctgtttttttcagttgtgtctagcaaaatacttatctgccctttgaaataaaatgtttttgtttaaaaaatctcagaacactca

SEQ ID NO: 267 - DNA, 2012 bp, Homo sapiens
  misc_feature: Incyte ID No: 013899CB1
ccatgaactggcatctccccctcttcctcttggctgctgtgacgctgccttccatctgctcccacttcaatcctctgtctctcgaggaactaggctccaacacggggatccaggttttcaatcagattgtgaagtcgaggcctcatgacaacatcgtgatctctccccatgggattgcgtcggtcctggggatgcttcagctgggggcggacggcaggaccaagaagcagctcgccatggtgatgagatacggcgtaaatggagttggtaaaatattaaagaagatcaacaaggccatcgtctccaagaagaataaagacattgtgacagtggctaacgccgtgtttgttaagaatgcctctgaaattgaagtgccttttgttacaaggaacaaagatgtgttccagtgtgaggtccggaatgtgaactttgaggatccagcctctgcctgtgattccatcaatgcatgggttaaaaatgaaaccagggatatgattgacaatctgctgtccccagatcttattgatggtgtgctcaccagactggtcctcgtcaacgcagtgtatttcaagggtctgtggaaatcacggttccaacccgagaacacaaagaaacgcactttcgtggcagccgacgggaaatcctatcaagtgccaatgctggcccagctctccgtgttccggtgtgggtcgacaagtgcccccaatgatttatggtacaacttcattgaactgccctaccacggggaaagcatcagcatgctgattgcactgccgactgagagctccactccgctgtctgccatcatcccacacatcagcaccaagaccatagacagctggatgagcatcatggtgcccaagagggtgcaggtgatcctgcccaagttcacagctgtagcacaaacagatttgaaggagccgctgaaagttcttggcattactgacatgtttgattcatcaaaggcaaattttgcaaaaataacaacagggtcagaaaacctccatgtttctcatatcttgcaaaaagcaaaaattgaagtcagtgaagatggaaccaaagcttcagcagcaacaactgcaattctcattgcaagatcatcgcctccctggtttatagtagacagaccttttctgtttttcatccgacataatcctacaggtgctgtgttattcatggggcagataaacaaaccctgaagagtatacaaaagaaaccatgcaaagcaacgactactttgctacgaagaaagactcctttcctgcatctttcatagttctgttaaatatttttgtacatcgcttctttttcaaaactagttcttaggaacagactcgatgcaagtgtttctgttctgggaggtattggagggaaaaaacaagcaggatggctggaacactgtactgaggaatgaatagaaaggcttccagatgtctaaaagattctttaaactactgaactgttacctaggttaacaaccctgttgagtatttgctgtttgtccagttcaggaatttttgttttgttttgtctatatgtgcggcttttcagaagaaatttaatcagtgtgacagaaaaaaaaatgttttatggtagcttttactttttatgaaaaaaaaattatttgccttttaaattcttttcccccatccccctccaaagtcttgatagcaagcgttattttgggggtagaaacggtgaaatctctagcctctttgtgtttttgttgttgttgttgttgttgttttatataatgcatgtattcactaaaataaaatttaaaaaactcctgtcttgctagacaaggttgctgttgtgcagtgtgcctgtcactactggtctgtactccttggatttgcatttttgtattttgtacaaagtaaaaataaactgttatgagtagtaaaaataaagctatttctctgctatttgaaaatacaatagaagaaactgagccttttagacattcgtcagcctcttctaataaacctttgtactatgtaaaaaaaaaa

SEQ ID NO: 268 - DNA, 1534 bp, Homo sapiens
  misc_feature: Incyte ID No: 988704.26
gcgccctccattttgtggagcgccagagctgctaagtgcgtcagttgtggagtggcgtagacgagttaagtcctggtctgcgtggaggtcgacgactccgtcgcagactacggacctgtctgggtctcagccgccaaagaccccgtccggtaggaagtactagccggacatcatgagtggctgtcgggtattcatcgggagactaaatccagcggccagggagaaggacgtggaaagattcttcaagggatatggacggataagagatattgatctgaaaagaggctttggttttgtggaatttgaggatccaagggatgcagatgatgctgtgtatgagcttgatggaaaagaactctgtagtgaaagggttactattgaacatgctagggctcggtcacgaggtggaagaggtagaggacgatactctgaccgttttagtagtcgcagacctcgaaatgatagacgaaatgctccacctgtaagaacagaaaatcgtcttatagttgagaatttatcctcaagagtcagctggcaggatctcaaagatttcatgagacaagctggggaagtaacgtttgcggatgcacaccgacctaaattaaatgaaggggtggttgagtttgcctcttatggtgacttaaagaatgctattgaaaaactttctggaaaggaaataaatgggagaaaaataaaattaattgaaggcagcaaaaggcacagtaggtcaagaagcaggtctcgatcccggaccagaagttcctctaggtctcgtagccgatcccgttcccgtagtcgcaaatcttacagccggtcaagaagcaggagcaggagccggagccggagcaagtcccgttctgttagtaggtctcccgtgcctgagaagagccagaaacgtggttcttcaagtagatctaagtctccagcatctgtggatcgccagaggtcccggtcccgatcaaggtccagatcagttgacagtggcaattaaactgtaaataacttgccctgggggcctttttttaaaaaaccaaaaccacaaaaattcccaaaccatacttgctaaaaattctggtaagtatgtgcttttctgtgggggtgggatttggaaggggggttgggttgggctggatatctttgtagatgtggaccaccaaggggttgttgaaaactaattgtattaaatgtcttttgataagccttctgctcacatttttgtgaatgtctgaagtatatagtttgtgtatattgacagagctcttttataactaaagcaaatttaatttttttgtactagaaaaaaatttgaacattttagttcttggttataaaaatgttaattcagaattagtttaatgccttaattaaactaattaatagctttggacacttaaaagagctctaaatttgcttgtacataaaggcttaatttgttttccttgttagggtcaagggtgtcctccactctttaacagctgctggacagacacattagagcagctgtttgttattgataataaaatattataaaact

SEQ ID NO: 269 - DNA, 3280 bp, Homo sapiens
  misc_feature: Incyte ID No: 1820904CB1
cggcgattctgcacatcgccgactgctttggggtaacaaaaagacccgagttgcctgccgaccgaggacccccgggagccgggctcggagcagacgaggtatccggcggcgcccatttgggggcttctaactctttctccacgcagcccctcttctgtcccctcccctctcgctcccttttaaaatcagtggcaccgaggcgcctgcagccgcactcgccagcgactcatctctccagcgggtttttttttgtttgtcgtgtgcgatcctcacactcatgaacatacacaggtctacccccatcacaatagcgagatatgggagatcgcggaacaaaacccaggatttcgaagagttgtcgtctataaggtccgcggacgccagccagagtttcagcccgaacctcggctccccgagcccgcccgagactccgaacttgtcgcattgcgtttcttgtatcgggaaatacttattgttggaacctctggagggagaccacgtttttcgtgccgtgcatctgcacagcggagaggagctggtgtgcaaggtgtttgatatcagctgctaccaggaatccctggcaccgtgcttttgcctgtctgctcatagtaacatcaaccaaatcactgaaattatcctgggtgagaccaaagcctatgtgttctttgagcgaacgtatggggacatgcattccttcgtccgcacctgcaagaagctgagagaggaggaggcagccagactgttctaccagattgcctcggcagtggcccactgccatgacggggggctggtgctgcgggacctcaagctgcggaaattcatctttaaggacgaagagaggactcgggtcaagctggaaagcctggaagacgcctacattctgcggggagatgatgattccctctccgacaagcatggctgcccggcttacgtaagcccagagatcttgaacaccagtggcagctactcgggcaaagcagccgacgtgtggagcctgggggtgatgctgtacaccatgttggtggggcggtaccctttccatgacattgaacccagctccctcttcagcaagacccggcgtggccagttcaacattccagagactctgtcgcccaaggccaagtgcctcatccgaagcattctgcgtcgggagccctcagagcggctgacctcgcaggaaattctggaccatccttggttttctacagattttagcgtctcgaattcagcatatggtgctaaggaagtgtctgaccagctggtgccggacgtcaacatggaagagaacttggaccctttctttaactgagctcatgccccacggagacttagcaggttccaggagtgagcgagggcagcggaaaggagttcttccgggggacacgaattgcctggctgagtagcaagaaagacacactcttaagtttcttggttcagagcaggaaaaccttcaaggagctgactgaccacgtagcatgggggcaagaggcgtgggatggggattggggtgagatggatgggagcccgctggagcttgtcttccctaacatagcctgggagaccaccccttgccacttgggccacttccgcctaccccacttttcattttgttccaaaatagttgcagatcctgacagaatcaaaactctctgcctcaaacacacatcctggcatcgcactgttagcatttaacttcttgttaggattcagggaaggaacagttggccaagaattttttttcttttaaacaagccaaccacctagctggtaattaatgaggttcacttaaaaaaaaaattcggtgcacacagactgacatgaaacctgggtgctacagtaaaagaaaacaaaagtccagtttgtgtctcttaatcgctcacttcaactcatttcttctaaataaactatttaatatcctggtcaggaaatgacatgttaatgctttgctccctgaagggggaaaaaatctgtcctttaacaagctattctgttttgtgtcaattggttcgtggcaggaagctattagaagtcaaacgtccagatgcattactgctatcttagtttaaagggggaaagaaaagggaagaagaaaggaaaagagaaatccaactcctttttcatgttttgcttttgaacaatgagggtttgtgtgacaggcattcctctatgctgagatgatagcaatggcctgagattttagcaagctcctggagtctgatgcttttgcagtactctgatcgcaactaaacatttgtctttgttttattagaaactagtgaaacaaagcaggttgtcccacatgtataaaatacagggcagctatttagttttctttacagagaatgatccttttaaggcttgtaaggccctctggtttggacaaaaaccctcagtagagacaagcgggaaggataattagctgaaagctatgatgatataaataaaaacagctctctatcccaatacgcacctttgtattttcaagaactcttctatttattaaggaaaatgtcacattgtgatgtattaagccagtacttcaattacgggttgacttgggatgacatattacatgctgtagttaacatttataattctttttccttgtttgagtatttctgtctctgaaataaccttttacttggcttttctagatagctttatttgatttcgagtggcaaaatgttttttattacggcttttctattgctgtatgatacagaactcttttggcataaatatttgtgttcccagtacctcacttgttcggatttgactgcctgtatatgttttgtgaaatggtcctgtttttgggtaggtgacacgtggactctagtatgtaaatgttacttgaatctgtgcttcataatagtgtgtggcatgtatgtgcagactcttggatgctttatgcctgcgcagcaggagccctgtcctcacgttcccaggagggcggcttcacccttcgtaaccaggagacaaggcggccatggatttgcccttgattctattttgctaatggaagatagaaaggagagaaggttttttttttttttaacattctgaagatggtgctgtgtcaagaaggaccttttttttcccctctcccctattttttaagtaccttggaggaggagaggttggtgacatgcatggtggggatctatggcctctggtgctttgtcctgtatttggtttaatgtttttgtcctaatctcttcaatcaataaaattgtgcgtatttaacgtggaaaaaaaaaaatagatttggggatttacaaaa

SEQ ID NO: 270 - DNA, 2900 bp, Homo sapiens
  misc_feature: Incyte ID No: 228434.9
  unsure 1782-1800: a, t, c, g, or other
tgtgctctaaaggtgatctaagcaggtcgcgtaccttcctcaggtgactccggccacagcccattgtccgcggccaccggcggagtttagccgcagacctcgaagcgccccggggtccttcccgaacggcagcggctgcggcgggtccatggagaagggccctgtgcgggcaccggcggagaagccgcggggcgccaggtgcagcaatgggttccccgagcgggatccgccgcggcccgggcccagcaggccggcggagaagcccccgcggcccgaggccaagagcgcgcagcccgcggacggctggaagggcgagcggccccgcagcgaggaggataacgagctgaacctccctaacctggcagccgcctactcgtccatcctgagctcgctgggcgagaacccccagcggcaagggctgctcaagacgccctggagggcggcctcggccatgcagttcttcaccaagggctaccaggagaccatctcagatgtcctaaacgatgctatatttgatgaagatcatgatgagatggtgattgtgaaggacatagacatgttttccatgtgtgagcatcacttggttccatttgttggaaaggtccatattggttatcttcctaacaagcaagtccttggcctcagcaaacttgcgaggattgtagaaatctatagtagaagactacaagttcaggagcgccttacaaaacaaattgctgtagcaatcacggaagccttgcggcctgctggagtcggggtagtggttgaagcaacacacatgtgtatggtaatgcgaggtgtacagaaaatgaacagcaaaactgtgaccagcacaatgttgggtgtgttccgggaggatccaaagactcgggaagagttcctgactctcattaggagctgagcttcattcagtgtgtgtgcgttggttgccgatcgtactgccagtagcattgtctgtctgtccggtcttgtttgtacattccattttcaattgttacagatgtgaactttattccttgtcactaattatatttaaaattatttctaggaagtcaaataaatataataaagggttgagccctctactttcttcttgccacctttttgtggcaatattaaagtgaactgctaatagtgtaagtacgtgcacaaaaccactgccagataaccagaggggcctgggaagggagaagaattagtgtatttttttcaaatagtacagtaatttgcctcataagcataggagcattgggaatgagagggaactgtgcccagtatactgttttttttcttcctccaataaaagtggtgtagtgccgaaagtgctaaaatatttagtgcggtattgctctgtgaattcaagttcaacagacttcactttggtcatgtttattaaaccaccagtgacatttaaaaatatatttttagcagtcgtaatgttagtcaccaagggaaggtggtggaatgtctatgtttttgattttactgtgagttaaaaaggcacatttctaccttctattgtttttaaattcaagaatagggaattagttcctggtgttgtttacgagtgtattctcgtgtcaacatacagggatttagacatttaactctctgtgccttgataagaatatcatttagagtgtagatacttttgcctttttaaaaaagccattattttatgagacttagtactcacactgcaaataactagtcagctcagttttaactttataggtttattgagtttcctttgtgtgatccatgtagatgcctcaaaatgtnnnnnnnnnnnnnnnnnnnaatcttataagatatttttctaagtatttccagaaacatttgagagtgcccatcattttcaggtctgcagaaccatagcttccacgcacctgaacgagcacagaatgaactgacggtggaagacattatgagctgtgtccaacgttttaaccaaagcgtatcgtaccaacgatctgtgaaaatgcactggaagcttctggtcccggtttcctttgtggtctatgtgggtcttgtcctcattgtaactccgtatagatggtataggtattttaatcctggaagctgttgccttattaatgattatcttaaaatttcctccatggggcagcgtgggccaaattaaaacaaacaaaaccgcaactcctccacagaaacacaaacacagttattccatgaagtttagtatttggttgacatagtgctcttcaaattcatcccattaccctaaaagtaataactttgatgcttgctttaactttagtcccatctctgccactttgatgctatttgggttatgatggggcaagatggcagaggtattgggtttttttgtttttttccattcctctctacttctgtttcctagctttttctttctggagtttaagtacagtgatggttggcttgagtacctttttaaatctagcccagtataaacattagcctgcttaatatttagacatttataggtagaattctgagcactcaactcatgtttggcattttaaagtaaaaacaagtgtgacttcgaggaccaaagaaattgtcagctatacatttatctttatgaactcatttatattcctttttaatgactcgttgttctaacatttcctagaagtgttcttataaaggtctaatgtatccacaggctgttgtcttattagtaaatgcaaagtaatgactttgtctgttttactctagtctttagtacttcaaaattaccttttcatatccatgatcttgagtccatttgggggatttttaagaatttgatgtatttcaatacactgttcaaaattaaattgtttaattttatgtatgagtatgtatgttcctgaagttggtcctatttaaattattaaactattgtaactttg

SEQ ID NO: 271 - DNA, 2470 bp, Homo sapiens
  misc_feature: Incyte ID No: 954999.6
  unsure 890: a, t, c, g, or other
ctccggcgcagtgttgggactgtctgggtatcggaaagcaagcctacgttgctcactattacgtataatccttttcttttcaagatttttattttagatgcctgaggaagtgcaccatggagaggaggaggtggagacttttgcctttcaggcagaaattgcccaactcatgtccctcatcatcaataccttctattccaacaaggagattttccttcgggagttgatctctaatgcttctgatgccttggacaagattcgctatgagagcctgacagacccttcgaagttggacagtggtaaagagctgaaaattgacatcatccccaaccctcaggaacgtaccctgactttggtagacacaggcattggcatgaccaaagctgatctcataaataatttgggaaccattgccaagtctggtactaaagcattcatggaggctcttcaggctggtgcagacatctccatgattgggcagtttggtgttggcttttattctgcctacttggtggcagagaaagtggttgtgatcacaaagcacaacgatgatgaacagtatgcttgggagtcttctgctggaggttccttcactgtgcgtgctgaccatggtgagcccattggcaggggtaccaaagtgatcctccatcttaaagaagatcagacagagtacctagaagagaggcgggtcaaagaagtagtgaagaagcattctcagttcataggctatcccatcaccctttatttggagaaggaacgagagaaggaaattagtgatgatgaggcagaggaagagaaaggtgagaaagaagaggaagataaagatgatgaagaaaagcccaagatcgaagatgtgggttcagatgaggaggatgacagcggtaaggatnagaagaagaaaactaagaagatcaaagagaaatacattgatcaggaagaactaaacaagaccaagcctatttggaccagaaaccctgatgacatcacccaagaggagtatggagaattctacaagagcctcactaatgactgggaagaccacttggcagtcaagcacttttctgtagaaggtcagttggaattcagggcattgctatttattcctcgtcgggctccctttgacctttttgagaacaagaagaaaaagaacaacatcaaactctatgtccgccgtgtgttcatcatggacagctgtgatgagttgataccagagtatctcaattttatccgtggtgtggttgactctgaggatctgcccctgaacatctcccgagaaatgctccagcagagcaaaatcttgaaagtcattcgcaaaaacattgttaagaagtgccttgagctcttctctgagctggcagaagacaaggagaattacaagaaattctatgaggcattctctaaaaatctcaagcttggaatccacgaagactccactaaccgccgccgcctgtctgagctgctgcgctatcatacctcccagtctggagatgagatgacatctctgtcagagtatgtttctcgcatgaaggagacacagaagtccatctattacatcactggtgagagcaaagagcaggtggccaactcagcttttgtggagcgagtgcggaaacggggcttcgaggtggtatatatgaccgagcccattgacgagtactgtgtgcagcagctcaaggaatttgatgggaagagccctggtctcagttaccaaggagggtctggagctgcctgaggatgaggaggagaagaagaagatggaagagagcaaggcaaagtttgagaacctctgcaagctcatgaaagaaatcttagataagaaggttgagaaggtgacaatctccaatagacttgtgtcttcaccttgctgcattgtgaccagcacctacggctggacagccaatatggagcggatcatgaaagcccaggcacttcgggacaactccaccatgggctatatgatggccaaaaagcacctggagatcaaccctgaccaccccattgtggagacgctgcggcagaaggctgaggccgacaagaatgataaggcagttaaggacctggtggtgctgctgtttgcaaaccgccctgctatcttctggcttttcccttgaggatccccagacccactccaaccgcatctatcgcatgatcaagctaggtctaggtattgatgaagatgaagtggcagcagaggaacccaatgctgcagttcctgatgagatcccccctctcgagggcgatgaggatgcgtctcgcatggaagaagtcgattaggttaggagttcatagttggaaaacttgtgcccttgtatagtgtccccatgggctcccactgctggtgtctagtgtattgtaccctctcctgtccttgtgttgaaggcagtaaactaagggtgtcaagccccattccctctctactcttgacagcaggattggatgtagtgtatagtggtttattttattttcttca

SEQ ID NO: 272 - DNA, 3331 bp, Homo sapiens
  misc_feature: Incyte ID No: 3246885CB1
gccgagcagccgccggaggaccacggctcgcccagggctgcggaggaccgaccgtccccacgcctgccgccccgcgaccccgaccgccagcatgatcgccgcgcagctcctggcctattacttcacggagctgaaggatgaccaggtcaaaaagattgacaagtatctgtatgccatgcggctctccgatgaaactctcatagatatcatgactcgcttcaggaaggagatgaagaatggcctctcccgggattttaatccaacagccacagtcaagatgttgccaacattcgtaaggtccattcctgatggctctgaaaagggagatttcattgccctggatcttggtgggtcttcctttcgaattctgcgggtgcaagtgaatcatgagaaaaaccagaatgttcacatggagtccgaggtttatgacaccccagagaacatcgtgcacggcagtggaagccagctttttgatcatgttgctgagtgcctgggagatttcatggagaaaaggaagatcaaggacaagaagttacctgtgggattcacgttttcttttccttgccaacaatccaaaatagatgaggccatcctgatcacctggacaaagcgatttaaagcgagcggagtggaaggagcagatgtggtcaaactgcttaacaaagccatcaaaaagcgaggggactatgatgccaacatcgtagctgtggtgaatgacacagtgggcaccatgatgacctgtggctatgacgaccagcactgtgaagtcggcctgatcatcggcactggcaccaatgcttgctacatggaggaactgaggcacattgatctggtggaaggagacgaggggaggatgtgtatcaatacagaatggggagcctttggagacgatggatcattagaagacatccggacagagtttgacagggagatagaccggggatccctcaaccctggaaaacagctgtttgagaagatggtcagtggcatgtacttgggagagctggttcgactgatcctagtcaagatggccaaggagggcctcttatttgaagggcggatcaccccggagctgctcacccgagggaagtttaacaccagtgatgtgtcagccatcgaaaagaataaggaaggcctccacaatgccaaagaaatcctgacccgcctgggagtggagccgtccgatgatgactgtgtctcagtccagcacgtttgcaccattgtctcatttcgctcagccaacttggtggctgccacactgggcgccatcttgaaccgcctgcgtgataacaagggcacacccaggctgcggaccacggttggtgtcgacggatctctttacaagacgcacccacagtattcccggcgtttccacaagactctaaggcgcttggtgccagactccgatgtgcgcttcctcctctcggagagtggcagcggcaagggggctgccatggtgacggcggtggcctaccgcttggccgagcagcaccggcagatagaggagaccctggctcatttccacctcaccaaagacatgctgctggaggtgaagaagaggatgcgggccgagatggagctggggctgaggaagcagacgcacaacaatgccgtggttaagatgctgccctccttcgtccggagaactcccgacgggaccgagaatggtgacttcttggccctggatcttggaggaaccaatttccgtgtgctgctggtgaaaatccgtagtgggaaaaagagaacggtggaaatgcacaacaagatctacgccattcctattgaaatcatgcagggcactggggaagagctgtttgatcacattgtctcctgcatctctgacttcttggactacatggggatcaaaggccccaggatgcctctgggcttcacgttctcatttccctgccagcagacgagtctggacgcgggaatcttgatcacgtggacaaagggttttaaggcaacagactgcgtgggccacgatgtagtcaccttactaagggatgcgataaaaaggagagaggaatttgacctggacgtggtggctgtggtcaacgacacagtgggcaccatgatgacctgtgcttatgaggagcccacctgtgaggttggactcattgttgggaccggcagcaatgcctgctacatggaggagatgaagaacgtggagatggtggagggggaccaggggcagatgtgcatcaacatggagtggggggcctttggggacaacgggtgtctggatgatatcaggacacactacgacagactggtggacgaatattccctaaatgctgggaaacaaaggtatgagaagatgatcagtggtatgtacctgggtgaaatcgtccgcaacatcttaatcgacttcaccaagaagggattcctcttccgagggcagatctctgagacgctgaagacccggggcatctttgagaccaagtttctctctcagatcgagagtgaccgattagcactgctccaggtccgggctatcctccagcagctaggtctgaatagcacctgcgatgacagtatcctcgtcaagacagtgtgcggggtggtgtccaggagggccgcacagctgtgtggcgcaggcatggctgcggttgtggataagatccgcgagaacagaggactggaccgtctgaatgtgactgtgggagtggacgggacactctacaagcttcatccacacttctccagaatcatgcaccagacggtgaaggaactgtcaccaaaatgtaacgtgtccttcctcctgtctgaggatggcagcggcaagggggccgccctcatcacggccgtgggcgtgcggttacgcacagaggcaagcagctaagagtccgggatccccagcctactgcctctccagcacttctctcttcaagcggcgaccccctaccctcccagcgagttgcgctgggagacgctggcgccagggcctgccggcgcggggaggaaagcaaaatccaactaatggtatatattgtagggtacagaatagagcgtgtgctgttgataatatctctcacccggatccctcctcacttgccctgccactttgcatggtttgattttgacctggtcccccacgtgtgaagtgtagtggcatccatttctaatgtatgcattcatccaacagagttatttattggctggagatggaaaatcacaccacctgacaggccttctgggcctccaaagcccatccttggggttccccctccctgtgtgaaatgtatatcaccagcagacactgccgggcctccctcccgggggcagctgctgaatgcgagtgtgggcatagcattagctgcttcctccc

SEQ ID NO: 273 - DNA, 816 bp, Homo sapiens
  misc_feature: Incyte ID No: 242242.23
gacagagtttgacagggagatagaccggggatccctcaaccctggaaaacagctgtttgagaagatggtcagtggcatgtacttgggagagctggttcgactgatcctagtcaagatggccaaggagggcctcttatttgaagggcggatcaccccggagctgctcacccgagggaagtttaacaccagtgatgtgtcagccatcgaaaagaataaggaaggcctccacaatgccaaagaaatccaactaatggtatatattgtagggtacagaatagagcgtgtgctgttgataatatctctcacccggatccctcctcacttgccctgccactttgcatggtttgattttgacctggtcccccacgtgtgaagtgtagtggcatccatttctaatgtatgcattcatccaacagagttatttattggctggagatggaaaatcacaccacctgacaggccttctgggcctccaaagcccatccttggggttccccctccctgtgtgaaatgtattatcaccagcagacactgccgggcctccctcccgggggcactgcctgaaggcgagtgtgggcatagcattagctgcttcctcccctcctggcacccactgtggcctggcatcgcatcgtggtgtgtcaatgccacaaaatcgtgtgtccgtggaaccagtcctagccgcgtgtgacagtcttgcattctgtttgtctcgtggggggaggtggacagtcctgcggaaatgccatccttacgggtgactttccatcccttgaaccaaggcatgttagcacttggctccagcatgttgtcacc

SEQ ID NO: 274 - DNA, 1241 bp, Homo sapiens
  misc_feature: Incyte ID No: 629372CB1
  unsure 1097, 1222, 1224: a, t, c, g, or other
ccacgcgttttgtcagaagcgtccgcgccgcgaggaggaggccctgctggtttctgtgcgggctcttgtcaggatggtgaagctgttcatcggaaacctgccccgggaggctacagagcaggagattcgctcactcttcgagcagtatgggaaggtgctggaatgtgacatcattaagaattacggctttgtgcacatagaagacaagacggcagctgaggatgccatacgcaacctgcaccattacaagcttcatggggtgaacatcaacgtggaagccagcaagaataagagcaaaacctcaacaaagttgcatgtgggcaacatcagtcccacctgcaccaataaggagcttcgagccaagtttgaggagtatggtccggtcatcgaatgtgacatcgtgaaagattatgccttcgtacacatggagcgggcagaggatgcagtggaggccatcaggggccttgataacacagagtttcaaggcaaacgaatgcacgtgcagttgtccaccagccggcttaggactgcgcccgggatgggagaccagagcggctgctatcggtgcgggaaagaggggcactggtccaaagagtgtccgatagatcgttcaggccgcgtggcagacttgaccgagcaatataatgagcaatacggagcagtgcgtacgccttacaccatgagctatggggattcattgtattacaacaacgcgtacggagcgctcgatgcctactacaagcgctgccgtgctgcccggtcctatgaggcagtggcagctgcagctgcctccgtgtataattacgcagagcagaccctgtcccagctgccacaagtccagaatacagccatggccagtcacctcacctccacctctctcgatccctacgatagacacctgttgccgacctcaggagctgctgccacagctgctgctgcagcagcagccggctgctgtgttactgcagcttccacttcatattacgggcgggatcggagccccctgcgtcgcgctacagccccagtccccactgttggagagggctacggttacgggcatgagagtgagttgtcccaagcttcagcagccgcgcggnattctctgtacgacatggcccggtatgagcgggagcagtatgccgatcgggcgcggtactcagccttttaaagcttgaggtgggatgtgtgtgggctgaaattccgagctgcggttgtgcatganantacacccttcgtggtac

SEQ ID NO: 275 - DNA, 1940 bp, Homo sapiens
  misc_feature: Incyte ID No: 995070.11
gggagggaagcagcgcgcactcgcgcgtgcgtgagctggcgcgcgagaaagggcccggtcgcgtccaggctcgagcggccgtcgccattttgtaaggttctctctgacgtgggagccgccgtcgctgccgccacccggaggctcttgtcaggatggtgaagctgttcatcggaaaccttccccgggaggctacagagcaggagattcgctcactcttcgagcagtatgggaaggtgctggaatgtgacatcattaagaattacggctttgtgcacatagaagacaagacggcagctgaggatgccatacgcaacctgcaccattacaagcttcatggggtgaacatcaacgtggaagccagcaagaataagagcaaagcttcaaccaagttacacgtgggtaacatcagccccacttgtaccaaccaagagcttcgagccaagtttgaggagtatggtccggtcatcgaatgtgacatcgtgaaagattatgccttcgtacacatggagcgggcagaggatgcagtggaggccatcaggggccttgacaacacagagtttcaaggcaaaagaatgcatgtgcagttgtccacaagccggcttcggactgcccctggtatgggagaccagagtggctgctatcggtgtgggaaagaagggcactggtccaaagagtgcccagtagatcgtacgggtcgtgtggcagactttactgagcagtataatgaacaatatggagcagttcgaacaccttacaccatgggctacggggaatccatgtattacaacgatgcatatggagcactcgactactataagcgataccgggtccgctcttatgaggcagtagcagcggcggcagcggcttctgcatacaactacgcagagcagaccatgtcccatctgcctcaagtccaaagcacaactgtgaccagccacctcaactctacttctgttgatccctatgacagacacctattgccaaactctggcgctgctgccacttcagctgctatggctgctgctgcagccaccacttcctcctactatggaagggacaggagcccactgcgtcgtgctgcagccatgctccccacagttggagagggctacggttatgggccagagagtgaattatctcaggcttccgcagctacacggaattctctgtatgacatggcccggtatgaacgggagcagtatgtggaccgagcccggtactcagccttttaaaaactggaggtaggataattgcggactgaaccctcgggctgcggtcatatatgagaacttgctccgcgcggtcccctttgccgggatgtttccattgcttcatgtttcagtaaacaaaaggagtttgtgaccaactatgttttctttcttaattcttctaagttgacttttctttcctcctgaaactagtctctgtagcctttcactctgttccttatattctcagcctctgagcagccctaggtaaggattatgctggcatcccctttttcctgtgcagtggaacccctcttatcttgctttccctaggagttgaatccttctccctgcctacctgcagcatctcctttccctttaaaatgaccatgtagtggcaagcagccttttactcttctgttagctctggactcttaacacttaagttactcttctgaaattgctaggaccattgggggttttgttgtattgtttgttttttatgtccgacctgtgatcgtggtacagcattagctgaaatttacccttgttttactccactcctcccttttttaaaaaaattttttgacaaataaatgtttctaacacttaaatatctttttatgtttgtctttttattctctcccagttcttaagctacaaagttcaaactaatagatgtcagaaatttagatatagaagggagggtttaagcccaggcatggtggctta

SEQ ID NO: 276 - DNA, 1211 bp, Homo sapiens
  misc_feature: Incyte ID No: 087458CB1
ttttgtaatctctgaggagaagcagcagcaaacatttgctagtcagacaagtgacagggaatggattccaaacaccagtgtgtaaagctaaatgatggccacttcatgcctgtattgggatttggcacctatgcacctccagaggttccaagaagtaaagctttggaggtcacaaaattagcaatagaagctgggttccgccatatagattctgctcatttatacaataatgaggagcaggttggactggccatccgaagcaagattgcagatggcagtgtgaagagagaagacatattctacacttcaaagctttggtccacttttcatcgaccagagttggtccgaccagccttggaaaactcactgaaaaaagctcaattggactatgttgacctctatcttattcattctccaatgtctctaaagccaggtgaggaactttcaccaacagatgaaaatggaaaagtaatatttgacatagtggatctctgtaccacctgggaggccatggagaagtgtaaggatgcaggattggccaagtccattggggtgtcaaacttcaaccgcaggcagctggagatgatcctcaacaagccaggactcaagtacaagcctgtctgcaaccaggtagaatgtcatccgtatttcaaccggagtaaattgctagatttctgcaagtcgaaagatattgttctggttgcctatagtgctctgggatctcaacgagacaaacgatgggtggacccgaactccccggtgctcttggaggacccagtcctttgtgccttggcaaaaaagcacaagcgaaccccagccctgattgccctgcgctaccagctgcagcgtggggttgtggtcctggccaagagctacaatgagcagcgcatcagacagaacgtgcaggtttttgagttccagttgactgcagaggacatgaaagccatagatggcctagacagaaatctccactattttaacagtgatagttttgctagccaccctaattatccatattcagatgaatattaacatggagagctttgcctgatgtctaccagaagccctgtgtgtggatggtgacgcagaggacgtctctatgccggtgactggacatatcacctctacttaaatccgtcctgtttagcgacttcagtcaactacagctgagtccataggccagaaagacaataaatttttatcattttgag

SEQ ID NO: 277 - DNA, 2667 bp, Homo sapiens
  misc_feature: Incyte ID No: 973308.1
ctagttctagatcgcgagccgccgctcgggaggaaagttgagacggagagggttcatttgatcctgcgactacgctgcggcctcccgcccgctcccgctgcgctcccgcggccctcgctcgcctcgcgccggcagttttgggcctacacctcccctccccccgccagccgccaaagacttgaccacgtaacgagcccaactcccccgaacgccgcccgccgctcgccatggatgccggtgtgactgaaagtggactaaatgtgactctcaccattcggcttcttatgcacggaaaggaagtaggaagcatcattgggaagaaaggggagtcggttaagaggatccgcgaggagagtggcgcgcggatcaacatctcggaggggaattgtccggagagaatcatcactctgaccggccccaccaatgccatctttaaggctttcgctatgatcatcgacaagctggaggaagatatcaacagctccatgaccaacagtaccgcggccagcaggcccccggtcaccctgaggctggtggtgccggccacccagtgcggctccctgattgggaaaggcgggtgtaagatcaaagagatccgcgagagtacgggggcgcaggtccaggtggcgggggatatgctgcccaactccaccgagcgggccatcaccatcgctggcgtgccgcagtctgtcaccgagtgtgtcaagcagatttgcctggtcatgctggagacgctctcccagtctccgcaagggagagtcatgaccattccgtaccagcccatgccggccagctccccagtcatctgcgcgggcggccaagatcggtgcagcgacgctgcgggctacccccatgccacccatgacctggagggaccacctctagatgcctactcgattcaaggacaacacaccatttctccgctcgatctggccaagctgaaccaggtggcaagacaacagtctcactttgccatgatgcacggcgggaccggattcgccggaattgactccagctctccagaggtgaaaggctattgggcaagtttggatgcatctactcaaaccacccatgaactcaccattccaaataacttaattggctgcataatcgggcgccaggccaaggcgccaacattaatgagatccgccagatgtccggggcccagatcaaaattgccaacccagtggaaggctcctctggtaggcaggttactatcactggctctgctgccagtattagtctggcccagtatctaatcaatgccaggctttcctctgagaagggcatggggtgcagctagaacagtgtaggttccctcaataacccctttctgctgttctcccatgatccaactgtgtaatttctggtcagtgattccaggttttaaataatttgtaagtgttcagtttctacacaactttatcatccgctaagaatttaaaaatcacattctctgttcagctgttaatgctgggatccatatttagttttataagcttttccctgtttttagttttgttttgggttttttggctcatgaattttatttctgtttgtcgatctcgagccgcctttattgcttacgtcacatattccaatgaatacaataaactcctttttaaaaaagtaaggcacatgaaaagccttttgtgtaagttccatgttattttaaaattcctattggctaataaaagcatttgcactatagaaccagagacatctagaaaagcacatgatagatttttttgcaagcagaatgcctgaaacattacatttacctcatggcacaatgagacagtcaccaaatccaatgtctgcattagaacgatacagctactattacagttgcaaaaccattaatcagcttatccacatatgtacagctgggtccccacgtgacaaaatctaaaggaagaacagcatctaactgcacctgtgctccattccctcacagataggaactgtgacattttggctctttccatgttgtgctgctcttcacgagaggccagggtcatacgatactgaagaccatggacaggtactgttcgtacgacacctgaatccagccgtcctgatccgtgtcgtaacgtctgaatatatccgtcaacctctgcaggacgatgcagccctggatgaagtcgtcgaaggcaatctgcccccgtccctgcctgtcaaactttcgaatgaggatgtcgtggaactggtcagagagccggtagccgaaacctgagagggcctgcttcagctcgttcttatcgatcatcccggagttgtcccggtcgtacgtgcggaagacgttctgccagtccgtgatgtacttccacacacccgtgaactcgctgaagttcacgccggccttgttctcacggtcaaacatggatatgatcgacctgacagtcactggattaaagggagtccacgtgccgttggagagagcttgctgaagctcggtgtctgatatcactccactcctgtctttatcgaccctctggaaaacgttccacaggaagctctggtcccggcagcgccgcgccctgcagcaggcccagggccggggcggtaagagtaggcggccatgggccaaggcacgcggctgggctgaggcgcctgcagcgacgagagacctctcaggccgactccgcttccgcctctgccgggggc

SEQ ID NO: 278 - DNA, 1427 bp, Homo sapiens
  misc_feature: Incyte ID No: 2445066CB1
cgacgccgcagcgctcgctttcccttccctcctctctggccctccctcctcccacccactggctccctcccccagcgctctccagtttctgtgccccaggagctacgcgacagtcttccaggattatggagtttctgagcgagaagtttgccctcaagagccctccgagtaaaaacagtgacttttacatgggcgcaggaggtcctctggagcacgttatggagacgctggacaatgagtccttttacagcaaagcgtctgcaggcaaatgcgtgcaggccttcggacccctgccccgcgccgagcatcacgtgcgcttggagaggacctcgccctgtcaggacagcagcgtgaactatgggatcactaaagtagaaggacagccccttcacaccgaactgaatagagctatggacaactgtaacagtctccgaatgtctcccgtgaaagggatgcaagagaagggagagctggatgaacttggggataaatgtgatagcaatgtatccagcagtaagaaacggaggcaccgaaccaccttcaccagtttgcagctagaggagctggagaaagtctttcagaaaactcattacccggatgtgtatgtcagagaacagcttgctctgaggacagagctcactgaggccagggtccaggtttggtttcaaaatcgaagggccaaatggagaaaaagggaacgttatggccaaatacaacaagcgaaaagccattttgctgccacctatgatatatcagttttgccaaggactgacagctacccacagattcagaacaatttgtgggcaggaaatgcaagtggtggttctgtggttacttcatgcatgttaccacgtgacacttcctcctgtatgacaccttattctcactcgcctcggacagattccagttacacggggttttcaaaccaccagaaccagttcagccacgtgcccctcaacaattttttcactgactctcttcttactggggcaaccaatggacatgcatttgaaacaaagccagagtttgaaaggaggtcttccagtatcgcagttcttcgaatgaaagccaaggagcacaccgccaatatttcatgggccatgtaacatacagtactcttttatttttcttttaatagcaaagttaaacattcttatttctcatatttaaaggataccacaataagctgctgtgtgtggaattgctaaaggtcaagatattcagtgagaccagcttaaatgaatagttgttatttaacattaaaatctaagaatgaacctctgaaaagactaaataggtttaccatgtgccagtctccacaaaccctgttttagtagtaaggttttctttttctattgtacaagtcaatgaaatatgatcacgcaacttattaaagaataaatgtgttaaacaaaaaaaaaaaaaaa

SEQ ID NO: 279 - DNA, 1598 bp, Homo sapiens
  misc_feature: Incyte ID No: 238449.10
  unsure 18: a, t, c, g, or other
ggctgcagcggcctctgnttcctccctgctaggctctgtcccacaatgcacccgagagcaggagctgaaagcctctaacacccacagatccctctatgactgcaatgtgaggtgtccggctttgctggcccagcaagcctgataagcatgaagctcttatctttggtggctgtggtcgggtgtttgctggtgcccccagctgaagccaacaagagttctgaagatatccggtgcaaatgcatctgtccaccttatagaaacatcagtgggcacatttacaaccagaatgtatcccagaaggactgcaactgcctgcacgtggtggagcccatgccagtgcctggccatgacgtggaggcctactgcctgctgtgcgagtgcaggtacgaggagcgcagcaccaccaccatcaaggtcatcattgtcatctacctgtccgtggtgggtgccctgttgctctacatggccttcctgatgctggtggaccctctgatccgaaagccggatgcatacactgagcaactgcacaatgaggaggagaatgaggatgctcgctctatggcagcagctgctgcatccctcgggggaccccgagcaaacacagtcctggagcgtgtggaaggtgcccagcagcggtggaagctgcaggtgcaggagcagcggaagacagtcttcgatcggcacaagatgctcagctagatgggctggtgtggttgggtcaaggccccaacaccatggctgccagcttccaggctggacaaagcagggggctacttctcccttccctcggttccagtcttccctttaaaagcctgtggcatttttcctccttctccctaactttagaaatgttgtacttggctattttgattagggaagagggatgtggtctctgatctctgttgtcttcttgggtctttggggttgaagggagggggaaggcaggccagaagggaatggagacattcgaggcggcctcaggagtggatgcgatctgtctctcctggctccactcttgccgccttccagctctgagtcttgggaatgttgttacccttggaagataaagctgggtcttcaggaactcagtgtctgggaggaaagcatggcccagcattcagcatgtgttcctttctgcagtggttctttatcaccacctccctcccagccccagcgcctcagccccagcagccccagctccagccctgaggacagctctgatgggagagctgggccccctgagcccactgggtcttcagggtgcactggaagctggtgttcgctgtcccctgtgcacttctcgcactggggcatggagtgcccatgcatactctgctgccggtcccctcacctgcacttgaggggtctgggcagtccctcctctccccagtgtccacagtcactgagccagacggtcggttggaacatgagactcgaggctgagcgtggatctgaacaccacagcccctgtacttgggttgcctcttgtccctgaacttcgttgtaccagtgcatggagagaaaattttgtcctcttgtcttagagttgtgtgtaaatcaaggaagccatcattaaattgttttatttctctcaaaaa

SEQ ID NO: 280 - DNA, 2458 bp, Homo sapiens
  misc_feature: Incyte ID No: 1078604.9
ggccagccctggttcctgctgcagccaccgtcctgacgttcatcggagcaggccggggcctggccttcccggcacaagtggctgttctgacaggcccccagtttgtcccatctgaactgctgggaggtttccgggtggccagaggagcaaagctgccttccaagtgcctgtctgtgcctgggagaacagagcaggagcgtcgtgcggtccaccgcgcagtgcatggcgattccaggcgctgaacaactcccctggacccttgggcctgcatctgactcccagctgcagagtcagaagctgagtccaggcaactgcttggccactcccgatcgctcctccctggacacccggttaccaaagtcagcaaagaagatgcggtaatcgccgcctgatctccacatggtgaacacaacactcccaccaacacctccttgactggtcggtcttcagcaccgggggtgggcaggcaggtgttctgtgttgacgagaattgcacaggctaaacacaaacacggaaccagagtgagaacacctcactcacggcagcccaggctgctccctaccaggtgacggagcgcgccggggctgtgggtgccaggggctgagtgctagggactcgtcatgagtggggatccccacgttcctgtcactgctgtcaaacagaaggtaaacagtcttatgaatgtatttccttaggaaaacttgtaaaaacttttattaggatatctatttaatactgaactttggcctactttgtgatagactataaacaaattgaggaaatcactatttctcacttctgtattttctcaaaaataattttgttacagagttcaatatactgtgtaccattgatcttctattgtgaaagcaaagaatttcatcaaaatattttaaattatgagtgaaaattgtgtatgttaattttgcagctataatattaatcaaattttgtgtaattctaatcacaaaatgacgtgccttaagtgcccctccagctgtgggttggcagtgtccagacagggagggcccatcaccgaaatcctgaacgattactagaccaattctattaaaaacatttcaaggcattttgggtgcaaactttgtttataaaagagaaatatccacctatgagaatttaaggagacgtctcctgtaggcagacatcgctctgcccaaaaattagcactgacacatgcgtgtgtgtgcgcgttgtgtgcgtgtgtgcgtgcacgtgctgttgctgcccttcctagctggtgtgaggaagccactggacacagctgtggcgcgacccctggatctgagcacagcccctccggtgcagacagatggggtcagagccccctgcggaggcctgtcattgcaggcacccgtgaggaggatgtgaccagtgaccgtgggtcccagcggtgaccctcacacagaatcagagcaaaacaccagtgagggctgcacactcaccaccattcgccctgggcactcattccagaagtaacaagaattccctctcagtgggaaaataaatgcatttttcattcttataagggacactctaatgactgtgaacactacgaattctaattcatatgcatttactgagcacttactgtatgccaggtgcattcaagacctgctgctaagtgggaagctgggttcagaggcacatggaacagctcgcccgctggatgccctgggaagagctacctcttctgagcccctgatgcttgttaagagctgcttctacttctcagttacttctcaagttttgattctttcaagaagtcccatttgtgaatttttcacatcttgtgaggatgaaataaaagcaaaatgtcaactctgccatctcaaaaacgtcttgagagcaaagcgtgtcctcaggctggagacctgcggcccatgggcagccatgggaggccctcacaggaacagatggccccgctgacacccccacctctcccacctgcactgcacggggcccacgggccagccttgtggggtactcacaggaacagatgggtctgctgacactcccacctctcccacctgcactgcatggggcccgtgggccagccttgtgaggtcctcacagggacagaagggcccgctgacacccccgcctctcccacctgcactgcctggggcccatgggccagtcttgtggggtcctcacagggacagaagggcccgctgacacccccacctcgcccatctgcgagtcctggggctctgagacagacagggatggagggaacgaagcgctgtatacacaggcgagaggaggaatgaagtcaatgcctttcactcactcaaccaatcatcttttctgtaaataagagagcacaggggtccccctctgagcaccgacccgactctctcatcctggtaattccccccttcctgagacgatctcgctccgtgccagtggagtattgaaatctcggctcaccacctc

SEQ ID NO: 281 - DNA, 2633 bp, Homo sapiens
  misc_feature: Incyte ID No: 1078604.7
cccgcgctgctgaagctggcgtcgctgccgccctcgtgccacgcaccgccgcacgcgcttggagcaggaggagacgccgctgtgacgccgccggcgggaagggtccgcgcgccatggctggccgctcgcgccctttcccaccgctgccgggaaaccgaggctcgccccaaacggatttgcgtgaaaccagcccaaggttccgggcccccccaaccgagccccgcgcccggggactgactcggggaccgactcagggacctcccgagcgccaggactcagggcccgacctgcagcggctgcaggcccagcgcccgcaagcggcctgggccgagcgccgtttccaggccctcgccaggtctttgaactgcaggtaaagtggcaggaacgtcttccgtctgctcagcgtttggggatttagactcctaaagccagtacctgccccgtttcccccccaggttccgtcctgcccgcgcccggtctcagggtggcggccccggacacggcccgtccccacagacgaggtctccggcctgagctgtcgcacctggcgcggaggtcgcccggggtgccctggctgggtgagaggtggcctggcgggcggagcttgccaagaatcacggccagtccttaagtggatggtggggcccagcagctgctctgtcccccttaacaaaccagggggcatggaggggcccagggcaccgcccccctaccaggctcaggccctccaaggagaacctgctgagacccctgagcctgtcctagaccccggacccctgacccttcccaccccttccagcgtcccagggcgaggccttggacagagctcctggtcctctgcagggagaccatccagcccaagctctgggaggcacagtccattgagtgggcggaggccgcgggtgctgagccggggagggtgctcggagtccatccatccctcagacggcaagtcccacagggtccaacccacctgaaacctgcctgcacggtggaagtggtggaggtggacactcctaggggcttttctaaagctagactcgcagctccttgctcaggaaaattaaactattcacgtttcagatcaagtgttgacagtcaccagtcaggaggagttcttaaagagttttatgttgactgaatattgcacattgagtccccattgagtccctggtgggaaaagtccacaatttcccattgatagctttttactgttgtgaaaaagggaagcgtcagccacacaaaagcctgcatgaccgctgcttcggagaagctctcgaccctaactgcagtcactgttacttggatcagatcaagcgcagtgactttttgggattcagtggttattctccacacttcgtagccatttcaaccaactctgagcacaaaatgcagccatcctctatgcagcaagccctgcccagtcagtgaccctactggacagatccaaggccagccctggttccctgctgcagccaccgtcctgacgttcatcggagcaggccggggcctggccttcccggcacaagtggctgttctgacaggcccccagtttgtcccatctgaactgctgggaggtttccgggtggccagaggagcaaagctgccttccaagtgcctgtctgtgcctgggagaacagagcaggagcgtcgtgcggtccaccgcgcagtgcatggcgattccaggcgctgaacaactcccctggacccttgggcctgcatctgactcccagctgcagagtcagaagctgagtccaggcaactgcttggccactcccgatcgctcctccctggacacccggttaccaaagtcagcaaagaagatgcggtaatcgccgcctgatctccacatggtgaacacaacactcccaccaacacctccttgactggtcggtcttcagcaccgggggtgggcaggcaggtgtttgtatgccaggtgcactcaagacctgctgctaagtgggaagctgggttcagaggcacatggaacagctcgcccgctggatgccctgggaagagctacctcttctgagcccctgatgcttgttaagagctgcttctacttctcagttacttctcaagttttgattctttcaagaagtcccatttgtgaatttttcacatcttggcctcccaaagtgttgggattacaggcgtgagccactgcgcccggcctccggggtaatgccttgattagctgggggtggggacagggcttgctgggtgcagctggtgtctcatctctcaaaggacccaaggagtaactctggggatgtcaaacaggaggggaccaggagggcaccctccaggctgaggggatgtcagacaggaggggaccaggagggcgccctccaggctgaggggatgtcagacaggaggggaccaggagggcgccctccaggctgaggggatgtcagacaggaggggatcaggagggcaccctctaggctgaggggatgtcagacatgaggggatcaggagggcgccctccaggctgaggggatgtcagacaggaggggaccaggagggcgccctccaggctgaggggatgtcagacaggaggggaccaggagggcgccctccaggctgaggggatgtcagacaggaggggatcaggagggcgccctccaggc

SEQ ID NO: 282 - DNA, 3426 bp, Homo sapiens
  misc_feature: Incyte ID No: 331016.2
cctgtccttggcctctgcggcgacgacagaacccgagagcgttcattccgggggcacaccctctcagcgagtggaatcgatggaagccctgcccatactgagccgtaacccaagcaggagcacagaccgagactgggagaccgcgtcggcggcatcttccctggcctcagtggccgagtacacaggtcccaagctctttaaggagcccagtagtaaatcaaacaagccgattattcacaatgccatatcccattgctgcctggctggaaaagtgaacgaaccccacaagaattccatattggaggagctggagaagtgtgatgccaatcactacatcatactgtttcgtgatgctggctgccagttcagggcgctttactgctactatcctgatactgaggaaatctacaaactcactggcacggggccaaagaacatcaccaagaaaatgatcgacaaactgtataaatacagctcagaccgaaaacagtttaacttgatcccagccaaaaccatgtctgtcagtgtggacgcactcacaatccacaaccacctgtggcagcccaagcggcctgcagtgccaaagaaggcccagactcgtaaatgaccccggtgcagctggcgtccaaagggtgacccagactcgtaaatgatgcccttgtggctggcatccagagggtgccacggggtccttatttattgttttcatctatttgggtacgaagtgtgcaaagtcacagaccttttgcaaagaggtttctagacagcagaagaaaacccctctctcagcgctcatctcacgcagaggatgccaggcagggtgaggatgggggagtagatgccgcttttgcagtggctcgcactgctgtggccactgctgaccactgaggctcccagcggagggtgttcacagccaggtcccgggccacggagctcccttacttgaagttctccttcagcatagattagacgtgatccactttgctttcttgcttctcacctcgcccccttgcacattgcctgacaccctcatattggccagctgtaatctcgtgactatgggactgaggctcaatcttggcttggggtgtttgaatgtctatagcaaaggaattcataatgggaaatctttttcatttgagaaattgtatgatatttattggttgtgtctactgccaacatttatatccaattctaagatttctgaaaaaaaaattcttatcccttgctgctcagaaaaagtttacggaaaacaccagttcactaaaagcaccgaaatctgcaaagcctgtcttccgctagaacaacgtctacaaatgtgaagatgatgacttctggcacgcggtcatgagggtggggaatggcactaggagctgatgtttgcctcatttaaagtaggcaagccgagccaactgcagccatcattcattaagttttgggtagtgctctaatggtttgttcactttaataaagacagattttggtaaagtagaatatttttcattctgagcatgtttgtcccaaaaggtgatgcacttaagctgacagtcccttcagtggttttgttaggtcacggcttgtcctgtctggattctgcatctggaagcgctgcatgctctcagaggagcgtgccgtttcccctgtagatggatacttttgttttgttgcctatttaaaaacaattaagtggttatttgcagttatttcagaactccaagtaagtggatggctttgggttctttctgccttggtcccaatggtgttgatgcttctgtggagcgcggacattcccaggagcaggtgcgtgccagccatggctgccagacactgctgcaactgaccagctgccggaagattctggagccactaacattagttttgcacatattttcttgggagtgttacttgaatctatctcaaactgcagaaaaaatcaaaagatcaataattgggagaaaaagagacaaatttaactgttacataattttagatagacaaaaaacatgagtgagtcgtgtacataaggagggaacatggtacagaaggctagaaggaattataggtcttattcccctttcctcagtcctttgaagagaagtacagtctcttgcgattttgtatatatcgtgttcgacacagccgctctctgtcctgtaaatagggaactaaaggctgtatgatttctcaagtgctgagttacacagtcctgagtgagctttctgttaccatactttcacacgtgggctttatttctcactgtatgtttgatatgatattactgtatttattttaagaaagcactaagatgtaataaagtgatgaactaatttgctttacattgaatcgtatgtgtgaggttgctgtggctcatttcgctgaccaggcgacaccaactccttgctttataggagtttcacattgttctttaccatggccctatcgaagtcagtggaattggattctttttaatgaagagctagaaaatatctggcatagagctggaaaattgcattcccatgggacgtctgaatcaattctggattttctccatggaatgagtcagtgtgtggaacatcctgaaacttgtccttaagcgtgtagttttcactgttcgttgcgagtaagcactaatgtggcatggacattcctgatgtcccaagtccccaggccagtgttcgcctaatgattgacagaagcgtccctgcgttcttcatgcttggacacagcaacccttttaattagtcttgaaaagtttcagacacaggattaattttcgtggtggtgcttttgggcctttctggcttgggtggtggtaaagtcatgattttgcagttgataacactgacttataactctgtttatcaatgtctcctatattcaaagcccctgcagtggtatttgtgtctcgttgcaaatttctttcagcggaaagcttgcacaactttcgttgtgtctcagaattctaaccttgttatttaagacaagctgctctacccatttaggatataactttgtaaagaaagtgtaaaccaaatgattcaatgtatgatgaagtttatgtgtaaatccttggtaatgctagaattctgggagcccagaagggttgaaagagaaatgaaacttgcgtgagtcccattattttacgcatgtatgtgcagatacgttctacccacacgtgtgcgtgcacatggctgtgtgcgtgcaccaaagatggactgctttccatgtgtccttttgactttctgcacgtgtcactgcggtgcagtctcttagcagacttcaggcccaaactgtattcttcactcaggcaaaattgaaaagtggaataattctaaattacttctaggttatacttttacctccctgaaattgtagttgtcacttggagggcaaaatatttattgaaataaaattttctgttaaaaa

SEQ ID NO: 283 - DNA, 1365 bp, Homo sapiens
  misc_feature: Incyte ID No: 1291103CB1
cggctcgagcgcgcggcgccgcctcttgctgcgcctccgcctcctcctctgctccgccaccggcttcctcctcctgagcagtcagcccgcgcgccggccggctccgttatggcgacccgcagccctggcgtcgtgattagtgatgatgaaccaggttatgaccttgatttattttgcatacctaatcattatgctgaggatttggaaagggtgtttattcctcatggactaattatggacaggactgaacgtcttgctcgagatgtgatgaaggagatgggaggccatcacattgtagccctctgtgtgctcaaggggggctataaattctttgctgacctgctggattacatcaaagcactgaatagaaatagtgatagatccattcctatgactgtagattttatcagactgaagagctattgtaatgaccagtcaacaggggacataaaagtaattggtggagatgatctctcaactttaactggaaagaatgtcttgattgtggaagatataattgacactggcaaaacaatgcagactttgctttccttggtcaggcagtataatccaaagatggtcaaggtcgcaagcttgctggtgaaaaggaccccacgaagtgttggatataagccagactttgttggatttgaaattccagacaagtttgttgtaggatatgcccttgactataatgaatacttcagggatttgaatcatgtttgtgtcattagtgaaactggaaaagcaaaatacaaagcctaagatgagagttcaagttgagtttggaaacatctggagtcctattgacatcgccagtaaaattatcaatgttctagttctgtggccatctgcttagtagagctttttgcatgtatcttctaagaattttatctgttttgtactttagaaatgtcagttgctgcattcctaaactgtttatttgcactatgagcctatagactatcagttccctttgggcggattgttgtttaacttgtaaatgaaaaaattctcttaaaccacagcactattgagtgaaacattgaactcatatctgtaagaaataaagagaagatatattagttttttaattggtattttaatttttatatatgcaggaaagaatagaagtgattgaatattgttaattataccaccgtgtgttagaaaagtaagaagcagtcaattttcacatcaaagacagcatctaagaagttttgttctgtcctggaattattttagtagtgtttcagtaatgttgactgtattttccaacttgttcaaattattaccagtgaatctttgtcagcagttcccttttaaatgcaaatcaataaattcccaaaaatttaaaaaaaaaaa

SEQ ID NO: 284 - DNA, 4656 bp, Homo sapiens
  misc_feature: Incyte ID No: 232597.3
cgctgcctcagctcctcagtgcacagtgctgcctcgtctgaggggacaggaggatcaccctcttcgtcgcttcggccagtgtgtcgggctgggccctgacaagccacctgaggagaggctcggagccgggcccggaccccggcgattgccgcccgcttctctctagtctcacgaggggtttcccgcctcgcacccccacctctggacttgcctttccttctcttctccgcgtgtggagggagccagcgcttaggccggagcgagcctgggggccgcccgccgtgaagacatcgcggggaccgattcaccatggagggcgccggcggcgcgaacgacaagaaaaataggataagttctgaacgtcgaaaagaaaagtctcgagatgcagccagatctcggcgaagtaaagaatctgaagttttttatgagcttgctcatcagttgccacttccacataatgtgagttcgcatcttgataaggcctctgtgatgaggcttaccatcagctatttgcgtgtgaggaaacttctggatgctggtgatttggatattgaagatgacatgaaagcacagatgaattgcttttatttgaaagccttggatggttttgttatggttctcacagatgatggtgacatgatttacatttctgataatgtgaacaaatacatgggattaactcagtttgaactaactggacacagtgtgtttgattttactcatccatgtgaccatgaggaaatgagagaaatgcttacacacagaaatggccttgtgaaaaagggtaaagaacaaaacacacagcgaagcttttttctcagaatgaagtgtaccctaactagccgaggaagaactatgaacataaagtctgcaacatggaaggtattgcactgcacaggccacattcacgtatatgataccaacagtaaccaacctcagtgtgggtataagaaaccacctatgacctgcttggtgctgatttgtgaacccattcctcacccatcaaatattgaaattcctttagatagcaagactttcctcagtcgacacagcctggatatgaaattttcttattgtgatgaaagaattaccgaattgatgggatatgagccagaagaacttttaggccgctcaatttatgaatattatcatgctttggactctgatcatctgaccaaaactcatcatgatatgtttactaaaggacaagtcaccacaggacagtacaggatgcttgccaaaagaggtggatatgtctgggttgaaactcaagcaactgtcatatataacaccaagaattctcaaccacagtgcattgtatgtgtgaattacgttgtgagtggtattattcagcacgacttgattttctcccttcaacaaacagaatgtgtccttaaaccggttgaatcttcagatatgaaaatgactcagctattcaccaaagttgaatcagaagatacaagtagcctctttgacaaacttaagaaggaacctgatgctttaactttgctggccccagccgctggagacacaatcatatctttagattttggcagcaacgacacagaaactgatgaccagcaacttgaggaagtaccattatataatgatgtaatgctcccctcacccaacgaaaaattacagaatataaatttggcaatgtctccattacccaccgctgaaacgccaaagccacttcgaagtagtgctgaccctgcactcaatcaagaagttgcattaaaattagaaccaaatccagagtcactggaactttcttttaccatgccccagattcaggatcagacacctagtccttccgatggaagcactagacaaagttcacctgagcctaatagtcccagtgaatattgtttttatgtggatagtgatatggtcaatgaattcaagttggaattggtagaaaaactttttgctgaagacacagaagcaaagaacccattttctactcaggacacagatttagacttggagatgttagctccctatatcccaatggatgatgacttccagttacgttccttcgatcagttgtcaccattagaaagcagttccgcaagccctgaaagcgcaagtcctcaaagcacagttacagtattccagcagactcaaatacaagaacctactgctaatgccaccactaccactgccaccactgatgaattaaaaacagtgacaaaagaccgtatggaagacattaaaatattgattgcatctccatctcctacccacatacataaagaaactactagtgccacatcatcaccatatagagatactcaaagtcggacagcctcaccaaacagagcaggaaaaggagtcatagaacagacagaaaaatctcatccaagaagccctaacgtgttatctgtcgctttgagtcaaagaactacagttcctgaggaagaactaaatccaaagatactagctttgcagaatgctcagagaaagcgaaaaatggaacatgatggttcactttttcaagcagtaggaattggaacattattacagcagccagacgatcatgcagctactacatcactttcttggaaacgtgtaaaaggatgcaaatctagtgaacagaatggaatggagcaaaagacaattattttaataccctctgatttagcatgtagactgctggggcaatcaatggatgaaagtggattaccacagctgaccagttatgattgtgaagttaatgctcctatacaaggcagcagaaacctactgcagggtgaagaattactcagagctttggatcaagttaactgagctttttcttaatttcattcctttttttggacactggtggctcactacctaaagcagtctatttatattttctacatctaattttagaagcctggctacaatactgcacaaacttggttagttcaattttgatcccctttctacttaatttacattaatgctcttttttagtatgttctttaatgctggatcacagacagctcattttctcagttttttggtatttaaaccattgcattgcagtagcatcattttaaaaaatgcacctttttatttatttatttttggctagggagtttatccctttttcgaattatttttaagaagatgccaatataatttttgtaagaaggcagtaacctttcatcatgatcataggcagttgaaaaatttttacaccttttttttcacattttacataaataataatgctttgccagcagtacgtggtagccacaattgcacaatatattttcttaaaaaataccagcagttactcatggaatatattctgcgtttataaaactagtttttaagaagaaattttttttggcctatgaaattgttaaacctggaacatgacattgttaatcatataataatgattcttaaatgctgtatggtttattatttaaatgggtaaagccatttacataatatagaaagatatgcatatatctagaaggtatgtggcatttatttggataaaattctcaattcagagaaatcatctgatgtttctatagtcactttgccagctcaaaagaaaacaataccctatgtagttgtggaagtttatgctaatattgtgtaactgatattaaacctaaatgttctgcctaccctgttggtataaagatattttgagcagactgtaaacaagaaaaaaaaaatcatgcattcttagcaaaattgcctagtatgttaatttgctcaaaatacaatgtttgattttatgcactttgtcgctattaacatcctttttttcatgtagatttcaataattgagtaattttagaagcattattttaggaatatatagttgtcacagtaaatatcttgttttttctatgtacattgtacaaatttttcattccttttgctctttgtggttggatctaacactaactgtattgttttgttacatcaaataaacatcttctgtggaccaggcccctttgatcagcttttatgttcaaatattaataatatttgcttcaacacctccaactcataaaattgtttaccaacaatttaagcacttatgaaaattacatggtactggttatttctacatttatcttagtgccatcaccttaatgtatgttgagtccctaaatgtcatgttaaataataacaaccataatatcccattgaaaagagtatgttgttagaaaagaaacatcatttttaagtttctgagcctattaaaatgctcaaacacaaaatattagtatttttaaaatatgaatgggatgagtgaagcagttctcagcattatagtcacaatgttacaaaggctagagcttctctgaagatttctaatctgttcccattaacagattaataaacttagacttcaaatgaataatttgcccaagctttaaaagtaatagatggcagaccaaaaatgtaagctcaagtctcctgactccaaagtcaaacctagaacaaacttggtttgtttttgttttaatgatactgcgttttaaaacaaagtagcttcatcctttttctcccgtatttttcttttacaaaatagctgtatttcttttatactgataatctcatttttaaaaatcagacagtgtagaaagatatttttaaaacagaaaaatcactatgaatccctgcacctacagg

SEQ ID NO: 285 - DNA, 5511 bp, Homo sapiens
  misc_feature: Incyte ID No: 1075592.6
  unsure 5496: a, t, c, g, or other
aaacttctgcaggggaaaagagctaggaaagagctgcaaagcaggtgtgggctttttcccttttttgctccttttcattacccctcctccgttttcacccttctccggacttcgcgtagaacctgcgaatttcgaagaggaggtggcaaagtgggagaaaagaggtgttagggtttggggtttttttgtttttgtttttgttttttaatttcttgatttcaacattttctcccaccctctcggctgcagccaacgcctcttacctgttctgcggcgccgcgcaccgctggcagctgagggttagaaagcggggtgtattttagattttaagcaaaaattttaaagataaatccatttttctctcccacccccaacgccatctccactgcatccgatctcattatttcggtggttgcttgggggtgaacaattttgtggctttttttcccctataattctgacccgctcaggcttgagggtttctccggcctccgctcactgcgtgcacctggcgctgccctgcttcccccaacctgttgcaaggctttaattcttgcaactgggacctgctcgcaggcaccccagccctccacctctctctacatttttgcaagtgtctgggggagggcacctgctctacctgccagaaattttaaaacaaaaacaaaaacaaaaaaatctccgggggccctcttggcccctttatccctgcactctcgctctcctgccccaccccgaggtaaagggggcgactaagagaagatggtgttgctcaccgcggtcctcctgctgctggccgcctatgcggggccggcccagagcctgggctccttcgtgcactgcgagccctgcgacgagaaagccctctccatgtgcccccccagccccctgggctgcgagctggtcaaggagccgggctgcggctgctgcatgacctgcgccctggccgaggggcagtcgtgcggcgtctacaccgagcgctgcgcccaggggctgcgctgcctcccccggcaggacgaggagaagccgctgcacgccctgctgcacggccgcggggtttgcctcaacgaaaagagctaccgcgagcaagtcaagatcgagagagactcccgtgagcacgaggagcccaccacctctgagatggccgaggagacctactcccccaagatcttccggcccaaacacacccgcatctccgagctgaaggctgaagcagtgaagaaggaccgcagaaagaagctgacccagtccaagtttgtcgggggagccgagaacactgcccacccccggatcatctctgcacctgagatgagacaggagtctgagcagggcccctgccgcagacacatggaggcttccctgcaggagctcaaagccagcccacgcatggtgccccgtgctgtgtacctgcccaattgtgaccgcaaaggattctacaagagaaagcagtgcaaaccttcccgtggccgcaagcgtggcatctgctggtgcgtggacaagtacgggatgaagctgccaggcatggagtacgttgacggggactttcagtgccacaccttcgacagcagcaacgttgagtgatgcgtccccccccaacctttccctcaccccctcccacccccagccccgactccagccagcgcctccctccaccccaggacgccactcatttcatctcatttaagggaaaaatatatatctatctatttgaggaaactgaggacctcggaatctctagcaagggctcaacttcgaaaatggcaacaacagagatgcaaaaagctaaaaagacaccccccccctttaaatggttttctttttgaggcaagttggatgaacagagaagggaagagaggaagaacgagaggaagagaagggaaggaagtgtttgtgtagaagagagagaaagacgaatagagttaggaaaaggaagacaagcaggtgggcaggaaggacatgcaccgagaccaggcaggggcccaactttcacgtccagccctggcctggggtcgggagaggtgggcgctagaagatgcagcccaggatgtggcaatcaatgacactattggggtttcccaggatggattggtcagggggagaaaggaaaaggcaaaacactccaggacctctcccggatctgtctcctcctctagccagcagtatggacagctggacccctgaacttcctctcctcttacctgggcagagtgttgtctctccccaaatttataaaaactaaaatgcattccattcctctgaaagcaaaacaaattcataattgagtgatattaaatagagaggttttcggaagcagatctgtgaatatgaaatacatgtgcatatttcattccccaggcagacattttttagaaatcaatacatgccccaatattggaaagacttgttcttccacggtgactacagtacatgctgaagcgtgccgtttcagccctcatttaattcaatttgtaagtagcgcagcagcctctgtgggggaggataggctgaaaaaaaaaagtgggctcgtatttatctacaggactccatatagtcatatataggcatataaatctattctttttctttgtttttttctttcttcctttctttcaaaggtttgcattaacttttcaaagtagttcctataggggcattgaggagcttcctcattctgggaaaactgagaaaacccatattctcctaatacaacccgtaatagcatttttgcctgcctcgaggcagagtttcccgtgagcaataaactcagcttttttgtggggcacagtactggatttgacagtgattccccacgtgtgttcatctgcacccaccgagccaggcagaggccagccctccgtggtgcacacagcacgcgcctcagtccatcccattttagtctttaaaccctcaggaagtcacagtctccggacaccacaccacatgagcccaacaggtccacgatggatccaccagtcccaccccagccttttcctttcatctgaacagaatgtgcatttttggaagcctccctcactctccatgctggcagagcaggagggagactgaagtaagagatggcagagggagatggtggcaaaaaggtttagatgcaggagaacagtaagatggatggttccggccagagtcgatgtggggaggaacagagggctgaagggagagggggctgactgttccattctagctttggcacaaagcagcagaaagggggaaaagccaatagaaatttccttagcttccccaccatatgtattttctaggatttgagaggaaagagaggaaaatgggggaatgggttgcaaaatagaaatgagcttaatccaggccgcagagccagggaaggtgagtaactttaggagggtgctagactttagaagccagataggaagaatcagtctaaactggccatgctttggaagggacaagactatgtgctccgctgcccaccttcagcctgcaatgagggactgaggcccacgagtctttccagctcttcctccattctggccagtccctgcatcctccctggggtggaggatggaaggaaagctgggacaagcagggaacgcatgattcagggatgctgtcactcggcagccagattccgaaactcccattctccaatgacttcctcaaccaatgggtggccttgtgactgttctttaaggctgaagatatccaggaaagggggcttggacactggccaaggagaccccttcgtgctgtggacacagctctcttcactctttgctcatggcatgacacagcggagaccgcctccaacaacgaatttggggctacgaagaggaatagcgaaaaagcaaatctgtttcaactgatgggaaccctatagctatagaacttgggggctatctcctatgcccctggacaggacagttggctggggacaggagaagtgctcaatcttcatgagacaaaggggcccgatagggccagcagccacaaggccttgacctgccgagtcagcatgccccatctctctgcacagctgtcccctaaacccaactcacgtttctgtatgtcttaggccagtatcccaaacctcttccacgtcactgttctttccacccattctccctttgcatcttgagcagttatccaactaggatctgccaagtggatactggggtgccactcccctgagaaaagactgagccaggaactacaagctccccccacattcctcccagcctggacctaattcttgagaggggctctctcttcacggactgtgtctggactttgagcaggcttctgccccttgcgttggctctttgctgccagccatcaggtgggggattagagcctggtgtaagtgcgccagactcttccggtttccaaagttcgtgcctgcgaacccaaacctgtgagtctcttctgcatgcaggagtttctcctgggcagctggtcactccccagagaagctgggccttcatggacacatggaactaagcctcccaaatgggagttctggctgagcccagggtggggagatcctgggaagggaggcactggaggaagacggcacctcttcccccatggcagggtgtgagggaggcaggtttggaatggtgcgagtatggcaatctaagcaggggtctggtctctttgactccaggctggcctttggccgactgtctgctcacccagagaccttggactccggactatccatggctccgaatctaagtgctgcccactcccatgctcacacccacagaaggtcttcccatcccctttagattcgtgcctcactccaccagtgaggaagatgcctctgtctttcccacgactgccaggagatagggaagcccagccaggactgaccctccttcctccagcctgccctgacccacctggcaaagcagggcacatggggaggaagagactggaacctttctttgacagccaggcctagacagacaggcctggggacactggccccatgaggggaggaaggcaggcgcacgaggtccagggaggcccttttctgatcatgccccttctctcccaccccatctccccaccaccacctctgtggcctccatggtacccccacagggctggcctcccctagagggtgggcctcaaccacctgctcccgccacgcaccggttagtgagacagggctgccacggcaaccgccaagcccccctcaaggtgggacagtaccccggacccatccactcactcctgagagggctccggcccagaatgggaacctcagagaagagctctaaggagaagaaaccccatagcgtcagagaggatatgtctggcttccaagagaaaggaggctccgttttgcaaagtggaggagggacgagggacaggggtttcaccagccagcaacctgggcctgtactgtctgtgtttttaaaaccactaaagtgcaagaatacattgcactgtttctccacttttatttccttagctttgttctattcaacatacttntggttctatgagata

SEQ ID NO: 286 - DNA, 872 bp, Homo sapiens
  misc_feature: Incyte ID No: 482357CB1
tggcgctgtaggactagaacgaaaggagtgaggcgccgagagcccagataccattttggcgtgagagctggtggttggcaaggccgcgggagtgggaagcgtccgccatgttctgcgaaaaagccatggaactgatccgcgagctgcatcgcgcgcccgaagggcaactgcctgccttcaacgaggatggactcagacaagttctggaggagatgaaagctttgtatgaacaaaaccagtctgatgtgaatgaagcaaagtcaggtggacgaagtgatttgataccaactatcaaatttcgacactgttctctgttaagaaatcgacgctgcactgtagcatacctgtatgaccgcttgcttcggatcaaagcactcagatgggaatatggtagcgtcttgccaaatgcattacgatttcacatggctgctgaagaaatggagtggtttaataattataaaagatctcttgctacttatatgaggtcactgggaggagatgaaggtttggacattacacaggatatgaaaccaccaaaaagcctatatattgaagtccggtgtctaaaagactatggagaatttgaagttgatgatggcacttcagtcctattaaaaaaaaatagccagcactttttacctcgatggaaatgtgagcagctgatcagacaaggagtcctggagcacatcctgtcatgaccatgcgccgaggcacttccaggcttcactcaactcatggactcctctgtactcactctctccaccactcccttcacctccctctttgattttagaagctatagacattgtttaagataactaagaatacttggctaagaagtataatttgctaactattaaggactttctttt

SEQ ID NO: 287 - DNA, 2109 bp, Homo sapiens
  misc_feature: Incyte ID No: 148820CB1
acagtgacctggctgttcacttccctgccattcagtatgctgtgctctacacattgtattctcattgtaccaggtactgtattcacaaatttttcttaagaaccccacaaaacattttatttttttaatggatagattttaaagatgtatgttgatttaactttggacttgcttgctttctttgattaaagatgaaaagataatctatgctttgtctttcaggcatgatcactttatctttagtagcctcagttcttcctctccttctttgtttgatggagctgtgattggcactgtaactatggccacaaagaaacatttctcaattatattaaatcttctgggaatgttacttaagaaagataaccaggacacgaggaaactgttaatgacttgggctttggaagtagctgttgtaatgaagaagtccgaaacatatgcacctttattctgtcttccgtctttccataaattttgcaaaggccttttagccgacactctcgttgaagatgtgaatatctgtctgcaggcatgcagcagtctacatgctctatcctcttccttgccagatgatcttttacagagatgtgttgatgtttgccgtgtccaactagtgcaccgtggaacttgtattcgacaagcatttggaaaactgttgaaatcaattcctttaggtgttttcctaagcgataacaatcacacagaaattcaagaaatttctttagcattaagaagtcacatgagtaaagcaccaagtaatacattccacccccaagatttctctgatgttattagttttattttgtatgggaactctcatagaacagggaaggacaattggttggaaagactgttctatagctgccagagactggataagcgtgaccagtcaacaattccacgcaatctcctgaagacagatgctatcctttggcagtgggccatatgggaagctgcacaattcactgttctttctaagctgagaaccccactgggcagagctcaagacaccttccagacaattgaaggtatcattcgaagtctcgcaggtcacacattaaaccctgatcaggatgttagtcagtggacaactgcagacagtgatgaaggccatggtaacaaccaacttagacttgttcttcttctgcagtatctggaaaatctggagaaattaatgtataatgcatacgagggatgtgctaatgccttaacttcacctcccaaggtcattagaacttttttgtataccaatcgccaaacttgtcaggactggctaacgcggattcgactctccatcatgagggtaggattgttggcaggccagcctgcagtgacagtgagacatggctttgacttgcttacagagatgaaaacaaccagcctatctcaggggaatgaattggaagtaagcattatgatggtggtagaagcactatgtgaacttcattgtcctgaagctatacagggaattgctgtctggtcatcatctattgttggaaaacatcttctgtggattaactcagtggctcaacaggctgaagggaggtttgaaaaggcctctgtggagtaccaggaacacctgtgtgccatgacaggtgttgattgctgcatctccagctttgacaaatcggtgctcaccttagccagtgctgggtgtaagagtgccagcctgaaacattgtctgaatggtgaatccagaaaaagtgtgctgtccaaaccgactgactcttcccctgaggttataaattatttaggaaacaaagcatgtgagtgctacatctcaactgccgattgggctgctgtgcaggaatggcagaacgctatccatgacttgaaaaagagtaccagtagcacttccctcaacctgaaagctgacttcaactatataaaatcattaagcagctttgagtctggaaaatttgtcgaatgtaccgagcaattagaattgttaccaggagaaaatatcaatctacttgctggaggatcaaaagaaaaaatagacatgaaaaaactgcttcgtaacatgtgaagtccagatccaagggaacctcagaaatccattgaagttccattgttaagaagttctgtttgtttggcaactgctttaaa

SEQ ID NO: 288 - DNA, 1071 bp, Homo sapiens
  misc_feature: Incyte ID No: 1336270CB1
cccacgcgtccgggacgcgtgggcaaagagcttataaatacattaggacctggaattcagttgtcgagccaggacggtgacagcgtttaacaaagcttagagaaacctccaggagactgctatcatggcagagaagcccaagctccactacttcaatgcacggggcagaatggagtccacccggtggctcctggctgcagctggagtagagtttgaagagaaatttataaaatctgcagaagatttggacaagttaagaaatgatggatatttgatgttccagcaagtgccaatggttgagattgatgggatgaagctggtgcagaccagagccattctcaactacattgccagcaaatacaacctctatgggaaagacataaaggagagagccctgattgatatgtatatagaaggtatagcagatttgggtgaaatgatcctccttctgcccgtatgtccacctgaggaaaaagatgccaagcttgccttgatcaaagagaaaataaaaaatcgctacttccctgcctttgaaaaagtcttaaagagccatggacaagactaccttgttggcaacaagctgagccgggctgacattcatctggtggaacttctctactacgtcgaggagcttgactccagtcttatctccagcttccctctgctgaaggccctgaaaaccagaatcagcaacctgcccacagtgaagaagtttctacagcctggcagcccaaggaagcctcccatggatgagaaatctttagaagaagcaaggaagattttcaggttttaataacgcagtcatggaggccaagaacttgcaataccaatgttctaaagttttgcaacaataaagtactttacctaagtgttgattgtgcctgttgtgaagctaatgaactctttcaaattatatgctaattaaataatacaactcctattcgctgacttagttaaaattgatttgttttcattaggatctgatgtgaattcagatttccaatcttctcctagccaaccattttcctggaattaaaaattcagtaaaaaaggaaaaacaaaaaaaaaaaa

SEQ ID NO: 289 - DNA, 6777 bp, Homo sapiens
  misc_feature: Incyte ID No: 902518.3
  unsure 2943-3047, 3360-3742, 4797-5085, 5157-5422: a, t, c, g, or other
gtcggggccgctttgcaggtccctagtcaggaccgagcaggggagtaggataggaatccccgccgcacctttgtacgagcctgaccccttccgtgggtttgttcctgggtcgccgtcaagctgcggtctctcctcccccgcccttcagccccgcggtctccaggggcggcgccctgggtctggaacgcggttgccaccgaggaggcggcggccctgcgtctggaacgccgttgccaccgaggaggcggcggccccgagcgcgcctggaagccccgggcaaccggccagggtcgggcacaggtggggtccgtcaggccgcccggggctcctctgtcccagctctgcggcccagggggtgacgtgatggcggcagcggtgctgacggaccgggcccaggtgtctgtgacctttgatgatgtggctgtgactttcaccaaggaggagtgggggcagctggacctagctcagcggaccctgtaccaggaggtgatgctggaaaactgtgggctcctggtgtctctggggtgtcctgttcccaaagctgagctgatctgccacctagagcatgggcaggagccatggaccaggaaggaagacctctcccaagacacctgtccaggcgacaaaggaaaacctaagaccacagaacctaccacttgtgagccagccttgtcagagggaatctcacttcagggacaagtgacacaaggaaactcagtggactcacagttggggcaagccgaggatcaggatgggctatcagaaatgcaggaaggacacttcagaccaggaatagatccccaggagaagtctcctgggaagatgagccctgaatgtgatggtttagggacagctgatggtgtgtgttcaaggattggacaggagcaagtctctccaggagatagagtccgtagccataactcatgtgagtcaggtaaagatcccatgattcaggaagaggaaaataactttaaatgcagtgaatgtggaaaagtatttaacaagaaacacctccttgctggacatgagaaaattcactctggagttaagccctatgaatgcacagaatgtgggaaaacctttattaagagcacacatctcctgcaacatcacatgatccacactggggagaggccctatgagtgcatggagtgtggaaaggccttcaaccgcaagtcataccttacccagcaccagagggttcacagtggagagaagccttacaaatgcagtgagtgtgggaaggccttcacccaccgctccaattttgtcttgcataacaggagacacactggagaaaaatcctttgtgtgcacagaatgtggccaagtctttcgacataggccaggctttctccggcactatgttgtccacagtggtgagaatccctatgagtgcttggagtgtggcaaggtcttcaaacacaggtcatatctcatgtggcaccagcagactcataccggggagaagccctatgagtgcagtgaatgtgggaaggtcttcttggagagtgcagccctgattcaccactatgtcatccacactggagagaagccctttgagtgcctcgagtgtgggaaggctttcaaccaccgatcctacctcaagaggcaccagcggattcacactggggagaagcccttcgtgtgcagtgaatgtggaaaggccttcacccactgctctacttttatcttgcataaaagggcccacactggagaaaagcctttcgagtgcaaagagtgtgggaaagcctttagcaatcggaaggacctcattcgccacttcagcatccacactggagagaagccctatgagtgcgtggagtgtggaaaggccttcacccgcatgtcgggcctcacgaggcacaagcggattcatagtggagagaagccctatgaatgtgttgagtgtgggaaatcgttttgctggagcacaaacctcattcgacatgccattatccacactggagagaagccctataaatgtagtgaatgtggaaaggccttcagtcgcagctcgtccctcactcagcatcaaaggatgcatactgggaaaaatcccatcagtgtaacagatgtgggaagaccttttacaagtggacaaacctcagttacccttcgagaacttcttttagggaaggactttttgaatgtaaccactgaggcaaatattttgccagaggaaacatcttcctctgcatctgatcaaccataccaaagagaaaccccacaagtgtcttcactgtgagaaaaccttctgttgctgaatattacttgtcatctgaagagtcatattagaaattcgttcagtctagagccttattctccatctgataatttatcctggagagagacccagtggttattgtgcacataggagaaccttcagctgcatctttctccttagtttacagtgcaattttatctcaggaattatttttaaaaggaggaggggacatagaaaaaatgaaatgcaagcacacatcttttcaggcttctctgccaagcctatggcgctttgtcatggatttcttagtgtatttgggggaagggaaatgtttcaaggtaaagaaccttgaccctttatgtgcttgtatgtacatttattgctatccagtgtcagaacagttagtttaggaaaagtatgcaaactttaatcgcacatcttctgtattccacaatagtacttactcttgagaagcataactttatgacaacttagggggcttgagccatgaaatactcacgtttaagtcagtaaggatacacatgttaacattcaggcttttgtcttgatgcccgtcttttggtttacgtcatcattgtagccatatggtaaatttttatttgttaaatttttaaaaattacttagctcaaaatgtcagtggtaaatttttaaattgagtaaagtgattcttctttgctcttatttaaaatcgacannnnnnnnnnnnnnnnnnnnnnnnnnnnnnnnnnnnnnnnnnnnnnnnnnnnnnnnnnnnnnnnnnnnnnnnnnnnnnnnnnnnnnnnnnnnnnnnnnnnnnnnngattaatctgttaagaattggtatctttactatgttgggtcttgtagttcatgagtgcaggagtaggcctcttaatttataatagttaagcattccttaaagtatttcattaatgttaaaaattttcagcgtatagatccctatgcatttttgttagaatttgcatcctagggtgcttttttgtttgtgtgtgtgtgtaatttgagtgattgtaaatggcattgatgtttgaactttgaattgcacacaatttttggtagtatacagaaatataatatttttggacattgttttgctaccctgcaaccttatnnnnnnnnnnnnnnnnnnnnnnnnnnnnnnnnnnnnnnnnnnnnnnnnnnnnnnnnnnnnnnnnnnnnnnnnnnnnnnnnnnnnnnnnnnnnnnnnnnnnnnnnnnnnnnnnnnnnnnnnnnnnnnnnnnnnnnnnnnnnnnnnnnnnnnnnnnnnnnnnnnnnnnnnnnnnnnnnnnnnnnnnnnnnnnnnnnnnnnnnnnnnnnnnnnnnnnnnnnnnnnnnnnnnnnnnnnnnnnnnnnnnnnnnnnnnnnnnnnnnnnnnnnnnnnnnnnnnnnnnnnnnnnnnnnnnnnnnnnnnnnnnnnnnnnnnnnnnnnnnnnnnnnnnnnnnnnnnnnnnnnnnnnnnnnnnnnnnnnnnnnnnnnnnnnnnnnnnnnnnnnncctgaacatgattgtggaagtgtgttgctctttcaagttctatcactttttgtttgcaaagttcaaagctgtattgtttggtacatatacatgtaggtttgccaagtctttgtggtgaattgactcttctgtcattatgtgatgtcatttttttgccttttaatagtcttgtcaatactttacctgatgttctcatagtgactcctgcatattttgattaatgtttgcatggttaatatttcttcattttattttaaagcttacctgtatcattacttatgaagtcagtttctttgaacagcatatactcaggccatgctttttttattcattctgcatatgtctctcttaattggtatgttgaaatgatttacattaaaataattattgatattttagggcttaagtgtgcccttaaatgatttttgtgttcttttttattgttcctctgttatttggggttgtttactagtcttcctataggttacttcaccttttttttttttaataatttgatttgatacatatgtagtgttttttagtatagatcctccttgacttatgatggggttatgtcacaataaacccattgcaagttgaaaatactatgtcaaatatgcatttaatacacctaccctgctgaacatcatagccgatcttgccttcagaatgctcagaaaatttacattagcctgcagttgggcaaaatcatctaacacaaggcctactttataataaagttactgcaaagaattttaaataaaaattcaagtgtggtttctactgaatgcatgtcgcattcgcaccattgtaaagtcaagtagtaagtcgaaccatcctaagtcagggactgtctgtatatatctgcattttttagtgattgttctactattacagtgtaaatatataacttatgacagtttaataagttatcagcaatttagcactttacttccattaggttcctttagcttacctactaatgtaactatcttaagtaatagtaattcctcttcaaaaattgagcgctatgttgcaagatgtaatttttcttnnnnnnnnnnnnnnnnnnnnnnnnnnnnnnnnnnnnnnnnnnnnnnnnnnnnnnnnnnnnnnnnnnnnnnnnnnnnnnnnnnnnnnnnnnnnnnnnnnnnnnnnnnnnnnnnnnnnnnnnnnnnnnnnnnnnnnnnnnnnnnnnnnnnnnnnnnnnnnnnnnnnnnnnnnnnnnnnnnnnnnnnnnnnnnnnnnnnnnnnnnnnnnnnnnnnnnnnnnnnnnnnnnnnnnnnnnnnnnnnnnnnnnnnnnnnnnnnnnnnnnnnnnnnnnnnnnnnnnnnnnnnnnnnnacaagatgtaatttttactttatctctcacacgtattttacaaacgtcatgagaaacattgtctcttgaccnnnnnnnnnnnnnnnnnnnnnnnnnnnnnnnnnnnnnnnnnnnnnnnnnnnnnnnnnnnnnnnnnnnnnnnnnnnnnnnnnnnnnnnnnnnnnnnnnnnnnnnnnnnnnnnnnnnnnnnnnnnnnnnnnnnnnnnnnnnnnnnnnnnnnnnnnnnnnnnnnnnnnnnnnnnnnnnnnnnnnnnnnnnnnnnnnnnnnnnnnnnnnnnnnnnnnnnnnnnnnnnnnnnnnnnnnnnnnnnnnnnnnnnnnnnnnnnnnnnnnnnnnncctctttacccattccattgttcattcttctttcttgaaatcccaaaccttctattaacatttcttttcagttatacactgaactttactgtagcctttcttctagagtaacaaatgttctttgttttccttcctctaaagatgtctttatgtttccttcattcccaaagaatatttttgtggaatataagattcagagttggcagttgttttcttttagacttcagagatgtatctctctgttctgtacattattgtttaatataagaaacctactaccattcaaataatcattccctattttacaatgcatcagttctgtcaagcttcattcaaagtgtttttcattgtctctagtgttcagaagtttggctgtgatgtgcgtggcatggaagtttttgggtgtattctatttggcgctccctggtgcttgcccagctttttgatctgtaggattatgccttttgcaaaatttggggaactttcaactattatttcttcaaatattttttcaccccccagtcttgtcttttttagggacttcaataacatgagtggcagatcttgttttacactcccatgggtccttcaggctctcatcttttttctttttccagtctattttctgtcttgttaatattgattaatttttattgaccttccatggtcctcactgattgttttctttgtcatacctaatctgttgagtttgtgcagtgagttttcattttggttttgtattttccagttgtttaatttccattgggtgggttcttttgtacaccttctgtttctttgcttattttttaacgccaaagaaagactctcagagaatagacaactatattccaaagtcatggttctctggtggtttgtcttgacatttgaatagaaatgttaaactatctgggggaatagaaagcccacagtcttctgagttgtgctacaccaatatttctatgaacagatcttacaactgagagtgatctgcagatttttcagagtcatgttctccatggaatgtttgtaaaattccctagctcctgcactgagctgagatcgtgccactgcactccagcctgggcaacagagcgagactccatctcaaaaaaaaaaaaaatttctctagctctctatgccttgttgtatcctcaggaaggagtcacctctcttccaggatcactcttgccttttgttattggacacattttcctacctcctgcccagtcttttttaggctctctgtcatacttcctcgcctagtctttaacttgtctctgataaccagatttttcccccataatctgtatctgtattcaagtctctatcctcatccccaaatggattctggaaag

SEQ ID NO: 290 - DNA, 6485 bp, Homo sapiens
  misc_feature: Incyte ID No: 406108.2
  unsure 6286, 6294, 6299, 6303, 6307, 6309, 6312, 6314, 6316, 6320, 6323, 6327,6330, 6333, 6337-6338, 6344, 6347, 6350, 6352, 6355, 6359, 6362, 6366, 6370,6377, 6380, 6382, 6386, 6392, 6399, 6405, 6409-6410, 6414, 6422, 6429, 6432,6438, 6448, 6450, 6460, 6464, 6476: a, t, c, g, or other
tccaccagaagcaggtgctgcgccaggagctcacgcagatccagagcagcctgaacggcggcgggggccacggcaggcaagggcgcgcccgggccgggcggcgcgctgcccacttgcccagcctgccacaagatcactccaagaactgaggcccctgtcagcagtgtcagtaatagtttggagaatgccctgcacacatcagcacattccacggaggagtcgctgcccaagaggcccttaggaaaacacagcaaaggtcttgtggtctgattcttcaataacatcagtaaccaaatcttcctctgaagtgacggaatttatttcaaagctatgtcagctctatcctgaagagaacttggagaaactcattccttgcttagctggtccggacgcattttatgtggagcgaaaccacgtggatctggactcaggcctgaggtacctggcctcattaccttctcacgtgttgaaaaatgaccatgtcaggaggtttctcagcacttcctctcccccacagcagcttcagagtccaagtcctggcaatccctccctttctaaagtaggtaccgtgatgggcgtgtctggaaggcctgtgtgtggagtggctggtatcccgtcctcgcagagcggagcccagcaccacgggcagcacccggccggctccgccgcccccttgcctcactgctcccatgcgggcagcgcgggctcagccctggcctaccggacccagatggacacatcacctgccatcctcatgccttccagtctgcagacccctcagacccaggagcagaatgggattctagactggcttaggaaactgcgtttgcacaagtattaccccgtctttaagcagctctccatggagaagtttttgagccttactgaagaagatctgaataaatttgagtctcttaccatgggggcaaagaagaagctcaagacccagctggagctggaaaaggagaagtcagagagacggtgcctgaacccctcggccccgccgctggtcaccagcagtggtgtggctcgagtgccccccaccagccacgtcgggcccgtgcagtcggggcggggcagccatgcagcagagctgcgggtggaagtggagcagccccatcaccagctgccccgggaaggcagttcctcggagtactccagctcctcctccagccccatgggggtacaggcccgggaagagagctccgacagcgctgaggagaatgacagacgtgtggagattcacttggagagctctgacaaggagaagccggtgatgctgctgaatcacttcacttccagttccgccagacccacggcccaggttctccctgtgcagaatgaggccagctccaatccatcaggccaccaccccctgcccccgcagatgctgagcgcagcctcacacatcacacccatccgcatgctgaattccgtgcacaagccggaaagagggagcgcggacatgaagctcctctcgtcttctgtgcactcacttttgtctctagaagaaaggaataaaggatctggaccaagaagcagcatgaaagtggacaagagctttggcagcgccatgatggacgtgctgcccgcgtccgcaccccaccagcctgtgcaggtcctctctgggctttcggagagcagctccatgtcacccacagtctcctttggtccccggaccaaagtcgtgcatgcatccacgctggacagggtgctgaagacagcacagcaaccggccctggtcgtggagaccagcacggctgccacggggacgcccagcacagtcctccacgccgcccgtccgcccatcaaactgctgctgtcgtcatctgttcctgctgattctgccatttctgggcaaacttcctgtcctaataatgtgcaaataagtgtgccccctgcaataataaacccccggactgctctgtacacagccaacaccaaagttgccttttctgcaatgagcagtatgccaatgggccccctgcagggtggcttctgtgcaaacagcaacactgcctctcccagcagccacccctccacgtcctttgccaacatggccacgttgcccagctgcccagcccccagctccagcccggcgctgtcctccgtccctgaaagcagtttctatagcagcagtggcggtggcggctccacaggaaacattcctgcctcgaatccgaaccaccaccaccaccaccaccatcagcagcccccggcacccccgcagcccgccccacccccgccaggctgcattgtgtgcacgtcctgtggctgcagcggcagctgcggctcgagtggcctgactgtcagctacgccaactacttccagcacccgttctccggtccgtccgtgttcaccttccccttcttgcccttcagtcccatgtgcagcagcggctacgtcagcgcccagcagtacggcggcggctccaccttccccgtcgtgcacgccccttacagcagcagcgggaccccagaccctgtcctgagtgggcagtccacgtttgccgtgccacccatgcagaacttcatggcagggacagcaggggtgtaccagacccaaggactggtgggcagtagcaatggttccagtcacaaaaagagcgggaacctatcttgttacaactgcggggccactggtcaccgcgcccaggactgcaaacagccgtccatggacttcaaccggccaggtacttttaggttgaaatacgcccctccagcagaaagtctggactccacagattgatatttttctctggcaacagaacgttattaagccatggagacataaggaaaattaaatacaaaactgagaagtctagttgctgttgagcttaatctttttaatccaaaggtgctttacttttcctagactggatagaaaatctagcgtagaagtgcatcaaactcgatttattgccaaaaccctagattggagcttggtgtcagaactcgcctagtgggcatctctgtggctggtgagatcggccacctccacttttggttgcagtgcagagacgccatgtctcccgaagagcattgccatcactggccctcctaggctcacacgtcaattccagggcagctacacgtggtctgaatcgagaaccgagcttggagttctccaagtggagttccacccgccggactcctgacacccctgggctagggaaaatgtcgactttgttttgttctgttcctaaagtgattagcactaatctctgggatttttaaggattgcactacagaagaatgtaccctgatgtaaatctctgcggttctgggagccaaactcctctgagaacagtcagtgcaagagactccaataatccatattgaaagagtcagcaccagcagaggctactcgacttaggacgcaacagaggttttagtatttccttccctcctccaagcacttgtagcagtttcaggtttttaatttttttctgcaaataaatctaaactacgttattaaatagaaatagtttactcgcaacaacttaatttctaagggtccaagtcccagagaatccatagtcgtcaaagctttgagagtatctttcttcccagccagtcagtggctttgagccctatcttccactacaaatgacctctcgaggggggacggcgacagcgcggctctgtgagtggctgtgaggatgctgcacgtcctcagcagagtttgcaagttgctttatctcccacgggctccccaagaacctccaaccccgaggcttatcgctagcggattcacacctgagacagacatttcaacaatgatacagtcctgtcatttatcagcaaaagattgggaattttctcctgtcaacttcttttgtattaggctgtgtattgatagttaattccgttaaaaattacttggaaaacagtgggaagtggtaggactctggaagaggccacacacccgagagctgcgagatctgtgcaagtctggttttggttaggtagtaataaaagtcctcactgtagatctctaaatttcaacccacggaaatgaaagccttttgtctgaaatttacggacttaaatcttcaaggttaaagggaattttctgctcaaataatactcttatcgaaaatgctaaagtcttcaatgttaaaatactgattggtaaaatcttgcagttgggattttgcagttggatatttattttaaaaaaaattataatattcagactattcttaaaatgggacaatcagcctcatgaaaaattgatgtaaatcagaagaataccctagaatgaggccttgtgatgtgagcgttcaatttgaagagcagttcctaacttcatagaaactaaagcagaaagttgttacattttttttatgacaggcttttagtagaattttttagttttattttagttgaattttatttctatgcaatgcagaattaacagacctcttctcctcatggtacacagtattacagtgttgaagtaatggtgatgcttattacaacagctatttaggggaatgttacgttgatctcttaaattgtaaacactacaaaatgtcaaaataatgagaactgacacaactttgccttaaagagtactagactggaccttctcatattacgtttaaggaagacttagagtgttcattgatgtttacgattttaatatttctgaaggccattacagtggcctggatatgtgctgaaagccaaacttttaaattttttggtttttttaagcaaagaaatattttaaataaatcctatttcaacactgaaattgttgaaaaccgtctcataacaaaaggaaaaaacattggaatttttgttttagtggtcagtataggggaatgaaagcgtctgttgttacccacgtaactattttgataagtattagaggttaaccttaaatccagcaaaacattaaaacagaaacttttcaacttggagcctgccattcagcgttgaggtagatgagttccgacactgtcacggctgtgttcccagcagcgaaggcctctgcggagctgccagtcgtcttgaacgtgcatgggcggcgtgtgacatctccagggaggccgtccgaagtcgagaatcgtcagctgtaagtaggagctacacagcgcagagaaaatggaaccacccatccgtgaggcctctttccggagggagccgcacacttggacttgagagtttgccagcagcgagctcggatgcatctctccaaaagccaccaaggtcggcgcgtctgaagagcgttttgcggtcatcagacttcctcatctgaaaacacagaacatactgaccctttcaagtacttagtcattttcctgaaagtgtggtctgtttcagaatgctgtggcaaccagtgttttattttatgccttgctcgttgtacatcatgatgactgatggtcttcaaggttgtgaggaaagccgtctccctgcttgactcgactgctgtcccagaggagagtcctgtgcgacctgagcgggggtggctgccatttccagcatgcaggtgacttccaaagaatgagtcaggtggcactgaaagccatgggttctgaagaggcgaatttgttgaaaagtcccaagggtctgaatgaaagcatctttaatcaacactcaacactcgcaatattctagaaaaccatatactgtgctggttgaggccaaaggttaacattgctccactgttcaccaaggaagggggcagtggccatccgccgcggcctcacgtgcgttgtaacaagccctcatcacatgtgtgagtcttacgtgcacaaaaagagaaggctttggtactgaaactggacaccttgtgtactcgataccttcacagcttctattggacatattttctttttaggaatgaaggaaaattctcccatttttgagccattcttttgtcaattctacaaaattgcatgtaactttataaatatttttaaaagatatagttttgtaaatatttaatattccgctaatttgattttgaattgtaaatgtcaagtattctgtttttggggtttttatgttttattatactttgttaaaaaggacaaattgtacatttttagaatgtttttatgagtaaatttaatgtactgaaaataaaaattttaaaaaaggctgttttatttcactaggtctttgtctcagaatatgaagcacacaccttttcacatcagtctgatctccaaactaggggttccatcctttctagcctctcacatttacagcagggatacctcattttaaatctgttgattctcaatcaagttgccaagtgttttgtgtntttttttnttttnccanatgnanttncncncttnttncccnggnggnaatnngggganacnatntnagnacangcnaacntccngggttcnagngnttcncctgcntaagccncccganaagnngggnttaaaggnatgcgcnacnaggccnggcaaatttngnatttttaagnaaanactggggcttcnccatgtggg

SEQ ID NO: 291 - DNA, 5981 bp, Homo sapiens
  misc_feature: Incyte ID No: 476265.8
gcgggagcgagcgcgcggtaacagttcgcggcagttcgcgcgggagcggggcgcctgggtggatgggcgcttgggcgcctggggctgccggacggtgggaacggaagtcgctgtgggacgctgaggaagccaggatggcgactccgagcaagaagacgtcaactccaagcccccagccttccaagagagctctcccgagagacccttcgtcggaggtcccgagcaagaggaagaattcggccccgcagctgccgctgttgcagtcgtccgggcctttcgtggaaggctctatcgtccgcatctcgatggagaacttcctaacatatgatatttgtgaagtatctcctggaccccacttgaatatgatcgttggagccaatggaacagggaagtcgagcattgtgtgtgccatttgccttggtttagctggaaaacctgctttcatgggacgagcagataaggttgggttttttgtgaagagaggatgttctagaggcatggttgaaattgaattgttcagggcttctggaaatcttgtaatcacccgtgagattgatgtggcaaaaaatcagtccttttggttcatcaacaaaaaatctacaacccagaaaatagtggaagagaaagttgcagccttaaatattcaagtggggaatctttgccagtttctccctcaggacaaagttggagaatttgctaaactcagcaaaattgaactcctcgaagccactgaaaagtcaattggtcccccagaaatgcacaaatatcactgtgaactcaaaaacttaagggagaaagaaaaacagctcgagacctcatgcaaagagaaaactgagtatctacagaaaatggttcagaggaatgaaagatataaacaagatgtggagaggttctatgaacggaagcgacatttagatttaattgagatgcttgaagcaaaaaggccatgggtggaatatgaaaatgttcgtcaggaatatgaagaagtaaaactagttcgtgaccgagtgaaggaagaggtcagaaaacttaaagaagggcagattcctataacatgtcgaattgaagaaatggaaaacgagcgtcacaatttggaggctcgaatcaaagaaaaggcaacagatattaaggaggcatctcaaaaatgcaaacagaagcaagatgttatagaaaggaaagataaacatattgaggaacttcagcaggctttaatagtaaagcaaaatgaagagcttgaccgacagaggagaataggtaatacccgcaaaatgatagaggatttgcaaaatgaactaaagaccacggaaaactgcgagaatcttcagccccagattgatgccattacaaatgatctgagacggattcaggatgaaaaggcattatgtgaaggcgaaataattgataagcgaagagagagggaaactctagagaaggagaaaaagagtgtggacgatcatattgtacgttttgacaatcttatgaatcagaaggaagataagctaagacagagattccgtgacacgtatgatgctgttttatggctaagaaataacagagacaaatttaaacaaagagtctgtgagcccataatgctcacgatcaatatgaaagataataaaaatgccaaatatattgaaaatcatattccatcaaatgacttaagagcctttgtatttgaaagtcaagaagatatggaggttttcctcaaagaggttcgtgacaataaaaaattaagagtaaatgctgttattgctcccaagagttcatatgcagacaaagcaccttcaagatctttgaatgaacttaaacaatacggatttttctcttatttgagagaattatttgatgcacctgatcctgtaatgagttacctttgctgtcagtatcatattcatgaagttcctgtaggaactgaaaagaccagagaaagaattgaacgggtaatacaagaaacccgattaaaacagatttatacagcagaagaaaagtatgtggtgaaaacttctttttattcaaacaaagttatttctagtaacacatctctaaaagtagcgcagtttctcactgtcactgtggacctagagcagagaagacacttagaagaacagctaaaggaaattcatagaaaattgcaagcagtggattcagggttgattgccttacgtgaaacaagcaaacatctggagcacaaagacaatgaacttagacaaaagaagaaggagcttcttgagagaaaaaccaagaaaagacaactggaacaaaaaatcagttccaaactaggaagtttaaagctgatggaacaggatacttgcaatcttgaagaggaagagcgaaaagcaagtaccaaaatcaaagaaataaatgttcaaaaagcgaaacttgttaccgaattaacaaacctaataaagatttgtacttctttgcatatacaaaaagtagatttaattctccaaaatactacagtgatctctgagaagaacaaattagaatcagattatatggccgcatcttcacaactccgtcttacagagcaacatttcattgaattggatgaaaatagacagagattattgcagaaatgcaaggaacttatgaaaagagctaggcaagtatgtaacctgggtgcagagcagactcttcctcaagaataccagacacaagtacccaccattccaaatggacacaactcctcactccccatggttttccaagaccttccaaacacattggatgaaattgatgctttattaactgaagaaagatcaagagcttcctgcttcacgggactgaatcctacaattgttcaggaatatacaaaaagagaagaagaaatagaacagttaactgaggaactaaagggaaagaaagttgaactagatcaatacagggaaaacatttcacaggtaaaagaaaggtggcttaatcctttaaaagagctggtagaaaaaattaatgaaaaattcagcaatttttttagttccatgcagtgtgctggtgaagttgatctccatacagaaaatgaggaagattatgataaatatggaattcgaattagagtcaaatttcgaagtagtactcaactgcatgaattaactcctcatcatcaaagtggaggtgaaagaagtgtttctaccatgttatacttgatggcacttcaggagctaaatagatgtccattcagagtagttgatgaaatcaatcagggaatggacccaatcaatgaacggagagtgtttgaaatggttgtaaatactgcctgtaaagaaaatacatctcaatactttttcataacaccaaagctcctgcaaaatcttccttattctgaaaagatgacagttttgtttgtctacaatggccctcatatgctggaaccaaacacatggaatttaaaggctttccaaaggcggcggcgccgtattacattcactcaaccttcttaataaaagtaaagagagggaacttgggaattttttttgttaaattctgtttataagtatggctcaactgaataaaaggagattcactaaaacgaaaagcagttatttttggaaacctgcttttaaatacaaataggttgataatggaaactataatgacctttccaaaatagcagctggtagtaaaagttaagtcttcttcagtcttggttgaacttgagttcttggcactctgaccatgagtcattcagttctcatgttaaaatgtacttaatattacaaatcaaaggtacagtggaagaagggttaatcacaagaagttacttatatggtagccctgagctttaattgcagagtaactttaattacttttagagcctaaagatgactctagagcctaagtcctagtttctcccaatgttatatttaattttaaaaaattgatatgaaaatgtctaatgtatagtaataatttatgacagatctagtcatttcttcctattaaaaaagattaccttatctccagtaggaaatggaattttatgggcctttaaaagaaagttttatgaaacttgatgctataattttattggtatttcaaggggaaaaaagcactggggttcaaaaatggtagcagaactgctttgaaatgctgcaaggtggccactagatgatgcaaaatacaaccaaaagattgactgagaataaaattaggtgacaagggtttttaaagaataaccttttaaagtgtgggggcaggggttgcttttttttattttatttaaagtcaattatattttacatcttacatttctaaaagcattttataattatttttagtaagatttttcttaaaatttcatatactggtttctacaatttatatttgaaatttctcagtgttatgtaaagagtgatggaaaagcattgatttctttaaaaccgtaatgtttttagaacttaagcctatagggcctttcttacaatgttgatgtacccattatcttagaaaatctagtttaaactgttttctttcaccgcaaaagaattaaatgggaaaatcatttgtttatctctaagttatactaattagtagaaccaaacaaattatcttcttttaaaaaataaatcttataggaaaatagacagtccaaagtcatgtctttgaacagtggattggatctgtgccagtaatgacaaaattatttttttgacttgcttgcctgaataaattgaagaattgctttcagtttgggttttgtatattcttaagtagccattgaaatttatattcttaactaggtcaaaaaataatgagccataagtttatgtcctctcacttagacattttctctttaaaaaggtattttcttctttataaacattttaaaagagccttcccttcttaaactaactccagtgcatgaagtgtgaaaatattttaaaatgacatttttactaatatgagcaagtcatgtaaacattgaagaacttggtaacatattagtaaatggatattaccaaatgttttcatcgttaattactttgcgttccaccaaaatatctttactaaaatgtgcttggtgtagtttgtttattgtctaaattagtaccagtcatcttatttctgcaaaatgagtatcaatgtgaaaaagacacgtgaagattaagcatgtttgaaaataaaatggtcaattacatttcaatttacataggccaacaactgttccatactttgtttgtaaacatttaatttctctactggacaaaattaatatttggctttacattgaattttgagctgtgaagaataaattatgtatcattttagcatattaaacagtagtaagtctagcacatagtctcagccacttaaaacaaaagtttttttgtttgtttgtttgtttgtttttttgagatggagtctcactctgttgcccaggctggagtgcagtggcgtgatctcggcttactgcaacctccgcctcccgggttcaagcgattctcctgcctcagcctcccaagtaactgggacaacaggcgcgtcccaccacacccagctaattttttatacttttagtagagatggggtttcagcatattggccaggctggtctcgaactcctgaccttgtgatccacccgcctcggctcccaaagtgctgggattataggcgtgagcccctgcacccggccaaaagttgatttttaattacataaaaatcgtaaaaacttctagtaaaaacttgatttggtgaatacagttatattttaaaaccttaaggtgacaagcattttctatgcctaaatcttcattggtttgcctggaaagagtctctgttaaaagattttccatattcaaagtaaaaggaaagatttcttgctttctaattgtcttttggacacatgcctattttctttgaggtataaacctttagatgtgaaaaatgtaatttcattctgctattgtgtgtgcttgtgtgtgtgtaattgaaaaaactgggaaatcctgctttgttggtaataaatcaatatttttatattc

SEQ ID NO: 292 - DNA, 2093 bp, Homo sapiens
  misc_feature: Incyte ID No: 175918.68
ggccattttgtgaagcggcgaaggaggtggtggctgcgttgggctccggggaagccgttcgggctggggctgtcggccgcggggcggaggcactcgcgcggggggtaattcggggtctgggttctggtgccgcgcagctttccccggattgacttggcctctacttcttgttaaggaaattcatctcttgttttatcagatggcccactgcgtgaccttggttcagctgtccatttcctgtgaccatctcattgacaaggacatcggctccaagtctgacccactctgcgtccttttacaggatgtgggagggggcagctgggctgagcttggccggactgaacgggtgcggaactgctcaagccctgagttctccaagactctacagcttgagtaccgctttgagacagtccagaagctacgctttggaatctatgacatagacaacaagacgccagagctgagggatgatgacttcctagggggtgctgagtgttccctaggacagattgtgtccagccaggtactgactctccccttgatgctgaagcctggaaaacctgctgggcgggggaccatcacggtctcagctcaggaattaaaggacaatcgtgtagtaaccatggaggtagaggccagaaacctagataagaaggacttcctgggaaaatcagatccatttctggagttcttccgccagggtgatgggaaatggcacctggtgtacagatctgaggtcatcaagaacaacctgaaccctacatggaagcgtttctcagtccccgttcagcatttctgtggtgggaaccccagcacacccatccaggtgcgatgctccgattatgacagtgacgggtcacatgatctcatcggtaccttccacaccagcttggcccagctgcaggcagtcccggctgagtttgaatgcatccaccctgagaagcagcagaaaaagaaaagctacaagaactctggaactatccgtgtcaagatttgtcgggtagaaacagagtactcctttctggactatgtgatgggaggctgtcagatcaacttcactgtgggcgtggacttcactggctccaatggagacccctcctcacctgactccctacactacctgagtccaacaggggtcaatgagtacctgatggcactgtggagtgtgggcagcgtggttcaggactatgactcagacaagctgttccctgcatttggatttggggcccaggttccccctgactggcaggtctcgcatgaatttgccttgaatttcaaccccagtaacccctactgtgcaggcatccagggcattgtggatgcctaccgccaagccctgccccaagttcgcctctatggccctaccaactttgcacccatcatcaaccatgtggccaggtttgcagcccaggctgcacatcaggggactgcctcgcaatacttcatgctgttgctgctgactgatggtgctgtgacggatgtggaagccacacgtgaggctgtggtgcgtgcctcgaacctgcccatgtcagtgatcattgtgggtgtgggtggtgctgactttgaggccatggagcagctggacgctgatggtggacccctgcatacacgttctgggcaggctgctgcccgcgacattgtgcagtttgtaccctaccgccggttccagaatgcccctcgggaggcattggcacagaccgtgctcgcagaagtgcccacacaactggtctcatacttcagggcccagggttgggccccgctcaagccacttccaccctcagccaaggatcctgcacaggccccccaggcctaggttcccttggaggctgtggcaagtcctcaatcctgtgtcccagaggtccctctgggccacaacccaacccttctcactctcctcagtgctagcactttgtattttttgatacttttatacttgtttctgcttttgctgctcttgatcccacctttgctcctgacaaccctcattcaataaagaccagtgaagaccaaaaaatacaaagtgctagcagggggggcgagtgatagggagctcgtcggacccggggatataaatcccgggaccgggtaacctg

SEQ ID NO: 293 - DNA, 4973 bp, Homo sapiens
  misc_feature: Incyte ID No: 257904.9
cacccgcatccgctgcgggagtccgagccggaaccacacccaagtagctgccctttcctcttctgtcatctcaccgccccaccacagaccgcgttccccgaggaaaccggccgcccacgcccggagcatcctcccctgttgagcgggcgctgacggacccggcggcatgatgcggctgcgaggctcggggatgctgcgggacctgctcctgcggtcgcccgccggcgtgagcgcgactctgcggcgggcacagcccttggtcaccctgtgccggcgtccccgaggcgggggacggccggccgcgggcccggctgccgccgcgcgactccacccgtggtggggcgggggcggctggccggcggaccccctcgcgcggggcctgtccacctctccttcggagatcttgcaggagctgggcaaggggagcacgcatccgcagcccggggtgtcgccacccgctgccccggcggcgcccggccccaaggacggccccggggacacggacgcgtttggcaacagcgagggcaaagagctggtggcctcaggtgaaaataaaataaaacagggtctgttacctagcttggaagatttgctgttctatacaattgctgaaggacaagagaaaatacctgttcataaatttattacagcactcaaatctacaggattgcgaacgtctgatcccaggttgaaagagtgtatggatatgttaagattaactcttcaaacaacatcagatggtgtcatgctagacaaagatctttttaaaaaatgtgttcagagcaacattgttttgttgacacaagcatttagaagaaagtttgtgattcctgactttatgtcttttacctcacacattgatgagttatatgaaagtgctaaaaagcagtctggaggaaaggttgcagattatattcctcaactggccaaattcagtcccgatttgtggggtgtgtctgtttgtacagtagatggacagaggcattctactggagataccaaagttcccttctgtcttcagtcctgtgtaaaacctttgaaatatgccattgctgttaatgatcttggaactgaatatgtgcatcgatatgttggaaaagagccgagtggactaagattcaacaaactatttttgaatgaagatgataaaccacataatcctatggtaaatgctggagcaattgttgtgacttcactaataaagcaaggagtaaataatgctgaaaaatttgactatgtcatgcagtttttgaataagatggctggtaatgaatatgttggattcagtaatgcaacgtttcagtctgaaagagaaagtggagatcgaaattttgcaataggatattacttaaaagaaaagaagtgttttccagaaggcacagacatggttggtatattagacttctacttccagctgtgctccattgaagtgacttgtgaatcagccagtgtgatggctgcgacactggctaatggtggttctgcccaattactggtgaaagagtactgagccctgaagcagttcgaaatacattgagtttgatgcattcctgtggcatgtatgacttctcagggcagtttgctttccatgttggtcttcctgcaaaatctggagttgctgggggcattcttttagttgtccccaatgttatgggtatgatgtgctggtctcctcctctggataagatgggcaacagtgttaagggaattcacttttgtcacgatcttgtttctctgtgtaatttccataactatgataatttgagacactttgcaaaaaaacttgatcctcgaagagaaggtggtgatcaaagggtaaagtcagtgataaatcttttgtttgctgcatatactggagatgtgtctgcacttcgaagatttgctttgtcagctatggacatggaacagcgggactatgattctagaacagcactccatgtagctgctgcagagggtcatgttgaagttgttaaatttttgctggaagccctgcaaagtaaaccctttccccaaggacaggtggaataacactcccatggatgaagcactgcactttggacaccatgatgtatttaaaattctccaagaataccaagtccagtacacacctcaaggagattctgacaacgggaaggaaaatcaaaccgtccataagaatcttgatggattgttgtaatggtctcaaatcccaagatttaaatcacttacctatttaattgtggaaaatgattatgaagaacatgtgtatttctatctggtagtgatgtatattttacatttgtcatttcagtgttactggagttttcttcattgtgcacacaggacaaatctgatctctttgggaaaaaatagaaataaaacaatctccctccataatgtgagcaatattacctcgtgcattgtataatttgatgtaaaagaaatagttaccaatgctagcttgtgtggtcttccatgatttatttgcgttttgtgaattttcaatttatggtgatgatctgctgatatgcatttataaagtaagctctgttgtacagtctgtccaaatgggtcaaggttgcctttagaagcaaatagtgtgattttcaagacttcaaatacaaatttagtttaagtgtttgaacaactatatgcacttacggttgtgtgtttaaaatgtctctctctcaccctagcttcatgatgtgactcttaaaaaactataatagttaacaactgttagtaagatagaccaattctgattagactttatcagggaatctgtttaagatatgtttggtgaccaaaacgtatgtgtgaatgtagttataatgcttttgaaaaattttcctttttctatatccccttagtccagcctctcttctcagacatttagctatctgcctctttcctttagctgggaaagtgagagctggcatactatgcagtttttatgttttccatagtaagtcagaaaatgcctcctatttctggcatcagaactttgccatttgtctacagaagacgaaccagagacaaaattactaagtataaattagtcaagtttatcagtctaaaaagcgaagggatgtgcaactgcagctctttaagaagttttttttttttagcttctagggtaaagataaattcagaaatgctctaagctaccaaagttattctgaaagtatgggaactgctacaactaacaaacatttgtttccaagcctgtcattaagagtctgcatcaagagatttgtcctccttgggggaccactggatcattccagatttcttgtgatttttctattgtgtaattcttggtgggctctgtagtttaataataagaaaaaggccatttcattttaaattgtgacctataattctttgtcttgggttggtaattcaggattcatttggaaagtgggtaaaaggggcttcaaaaaacggatagaacaggattttctaggagttacacatacattttatcctgtcatacctcgagataaagtggcatgttagtgaggagttctgatattaagcacacacacacatgcacacaaatggacttctctgaagctgtgtttagtgaaatgagctcaagtacatgaatgttagttgttatcacatacagcaaattcctttttttttctttttctatgagcacactctgctgcttctaaactttacatgcctgatggcaccttactccagcagcctccaggtgctttcattttcacttccagtctaagccagtggctcctgccactgccctcccattacctagatggcacctcctttggtgaaaccacggccaatgttccttagctgcaccaggcccgaagctgttcccatgcttgagcttccatggggaggatgctgagtgagcagtttcctaccccgtggatctagcaagccatggagacaggtagcatttgtaagatgctgcacaggagcagcattatccccaaagatattacagggtagacacgttttaactgaaatcaatcaagataactttattcaaagagcagcccgctttgtgtgactaaaatgaaacaagacagttgaattgtgtgacttgaagattaccaatgattttgaggcttttctataataaaaagaggttctaaccattatttgggaacaaagagagttttcatcttttttcagatcaaaaccattctgtaaaatctttgttgtttaattaaatgtgccgttatttacccctgatgttatttatgactatgtgccgattcctgctcgggctgtttgctgttggctggtaataatatatttgatttaaatgctgttgactgtgctattaactgctgccgtcagtaaactccaaagatctttttgttttggctttagtatcatatgtgctttttctgtatcctgagcgctctatatgatcatgttaatttaaagctttatacacattgttgtttttgctggtctcatctttggtaatatgctataccccactgctgcccgacactgccctttagctgcagagctggattagctgttgaccatttgatgctgttgtctgtctggcagggactgaatgacctgatgtcagatttagattcttcctggggattacacagctatgaatgtatttgcttctaaaacctcccaaagtgaatctaatcttaaaactacaagttgtaagtattctgaaattgggaaacatttattttaaatgcaatcaggtagtgttgctttttacagcataataaatatttcccaatttcagaattacttacaacttgtagttttaagattagattcactttgggaggttttagaagcaaatacattcatagctgtgtaatccccaggaagaatctaaatctgacatcaggtcattcagtccctgccagacagacaacagcatcaaatggtcaacagctaatccagctctgcagctaaagggcagtgtcgggcagcagtggggtatagcatattaccaaagctagtctcgagtctag

SEQ ID NO: 294 - DNA, 4855 bp, Homo sapiens
  misc_feature: Incyte ID No: 010498.24
  unsure 3259, 4828: a, t, c, g, or other
ggaggctgagagcagcagtagactggccaactgcagagcaagttgtttctccagccgtgcggtgcagcctcatgcccccaacccagcttagccactgtaagaagacgttcactgtacagacgaccaaacttgccgtggaagagacagttgtgagattcccttgcaaatttacatacgagaatggcttgtgaaatcatgcctctgcaaagttcacaggaagatgaaagacctctgtcacctttctatttgagtgctcatgtaccccaagtcagcaatgtgtctgcaaccggagaactcttagaaagaaccatccgatcagctgtagaacaacatctttttgatgttaataactctggaggtcaaagttcagaggactcagaatctggaacactatcagcatcttctgccacatctgccagacagcgccgccgccagtccaaggagcaggatgaagttcgacatgggagagacaagggacttatcaacaaagaaaatactccttctgggttcaaccaccttgatgattgtattttgaatactcaggaagtcgaaaaggtacacaaaaatacttttggttgtgctggagaaaggagcaagcctaaacgtcagaaatccagtactaaactttctgagcttcatgacaatcaggacggtcttgtgaatatggaaagtctcaattccacacgatctcatgagagaactggacctgatgattttgaatggatgtctgatgaaaggaaaggaaatgaaaaagatggtggacacactcagcattttgagagccccacaatgaagatccaggagcatcccagcctatctgacaccaaacagcagagaaatcaagatgccggtgaccaggaggagagctttgtctccgaagtgccccagtcggacctgactgcattgtgtgatgaaaagaactgggaagagcctatccctgctttctcctcctggcagcgggagaacagtgactctgatgaagcccacctctcgccgcaggctgggcgcctgatccgtcagctgctggacgaagacagcgaccccatgctctctcctcggttctacgcttatgggcagagcaggcaatacctggatgacacagaagtgactccttccccaacaaactcccattctttcatgaggcggcaaactcctctctggggtcctatgatgatgagcaagaggacctgacacctgcccagctcacacgaaggattcagagccttaaaaagaagatccggaagtttgaagatagattcgaagaagagaagaagtacagaccttcccacagtgacaaagcagccaatccggaggttctgaaatggacaaatgaccttgccaaattccggagacaacttaaagaatcaaaactaaagatatctgaagaggacctaactcccaggatgcggcagcgaagcaacacactccccaagagttttggttcccaacttgagaaagaagatgagaagaagcaagagctggtggataaagcaataaagcccagtgttgaagccacattggaatctattcagaggaagctccaggagaagcgagcggaaagcagccgccctgaggacattaaggatatgaccaaagaccagattgctaatgagaaagtggctctgcagaaagctctgttatattatgaaagcattcatggacggccggtaacaaagaacgaacggcaggtgatgaagccactatacgacaggtaccggctggtcaaacagatcctctcccgagctaacaccatacccatcattggttccccctccagcaagcggagaagccctttgctgcagccaattatcgagggcgaaactgcttccttcttcaaggagataaaggaagaagaggaggggtcagaagacgatagcaatgtgaagccagacttcatggtcactctgaaaaccgatttcagtgcacgatgctttctggaccaattcgaagatgacgctgatggatttatttccccaatggatgataaaataccatcaaaatgcagccaggacacagggctttcaaatctccatgctgcctcaatacctgaactcctggaacacctccaggaaatgagagaagaaaagaaaaggattcgaaagaaacttcgggattttgaagacaactttttcagacagaatggaagaaatgtccagaaggaagaccgcactcctatggctgaagaatacagtgaatataagcacataaaggcgaaactgaggctcctggaggtgctcatcagcaagagagacactgattccaagtccatgtgaggggcatggccaagcacagggggctggcagctgcggtgagagtttactgtccccagagaaagtgcagctctggaaggcagccttggggctggccctgcaaagcatgcagcccttctgcctctagaccatttggcatcggctcctgtttccattgcctgccttagaaactggctggaagaagacaatgtgacctgacttaggcattttgtaattggaaagtcaagactgcagtatgtgcacatgcgcacgcgcatgcacgcacacacacacacagtagtggagctttcctaacactagcagagattaatcactacattagacaacactcatctacagagaatatacactgttcttccctggataactgagaaacaagagaccattctctgtctaactgtgataaaaacaagctcaggactttattctatagagcaaacttgctgtggagggccatgctctccttggacccagttaactgcaaacgtgcattggagccctatttgctgccgctgccattctagtgacctttccacagagctgcgccttcctcacgtgtgtgaaaggttttccccttcagccctcaggtagatggaagctgcatctgcccacgatggcagtgcagtcatcatcttcaggatgtttcttcaggacttcctcagctgacaaggaattttggtccctgcctaggaccgggtcatctgcagaggacagagagatggtaagcagctgtatgaatgctgattttaaaaccaggtcatgggagaagagcctggagattctttcctgaacactgactgcacttaccagtctgattttatcgtcaaacaccaagccaggccagcatgctcatggcaatctgtttggggctgttttgttgtggcactagccaaacataaaggggcttaagtcagcctgcatacagaggatcggggagagaaggggcctgtgttctcagcctcctgagtacttaccagagtttaattttnttaaaaaaaatctgcactaaaatccccaaactgacaggtaaatgtagccctcagagctcagcccaaggcagaatctaaatcacactattttcgagatcatgtataaaaagaaaaaaaagaagtcatgctgtgtggccaattataatttttttcaaagactttgtcacaaaactgtctatattagacattttggagggaccaggaaatgtaagacaccaaatcctccatctcttcagtgtgcctgatgtcacctcatgatttgctgttacttttttaactcctgcgccaaggacagtgggttctgtgtccacctttgtgctttgcgaggccgagcccaggcatctgctcgcctgccacggctgaccagagaaggtgcttcaggagctctgccttagacgacgtgttacagtatgaacacacagcagaggcaccctcgtatgttttgaaagttgccttctgaaagggcacagttttaaggaaaagaaaaagaatgtaaaactatactgacccgttttcagttttaaagggtcgtgagaaactggctggtccaatgggatttacagcaacattttccattgctgaagtgaggtagcagctctcttctgtcagctgaatgttaaggatggggaaaaagaatgcctttaagtttgctcttaatcgtatggaagcttgagctatgtgttggaagtgccctggttttaatccatacacaaagacggtacataatcctacaggtttaaatgtacataaaaatatagtttggaattctttgctctactgtttacattgcagattgctataatttcaaggagtgagattataaataaaatgatgcactttaggatgtttcctatttttgaaatctgaacatgaatcattcacatgaccaaaaattgtgtttttttaaaaatacatgtctagtctgtcctttaatagctctcttaaataagctatgatattaatcagatcattaccagttagcttttaaagcacatttgtttaagactatgtttttggaaaaatacgctacagaatttttttttaagctacaaataaatgagatgctactaattgttttggaatctgttgtttctgccaaaggtaaattaactaaagatttattcaggaatccccatttgaatttgtatgattcaataaaagaaaacaccaagtaagttatataaaataaattgtgtatgagatgttgtgttttcctttgtaatttccactaactaactaactaacttatattcttcatggaatggagcccagaagaaatgagaggaagcccttttcacactagatcttatttgaagaaatgtttgttagtcagtcagtcagtggtttctggctctgccgagggagatgtgttccccagcaaccatttctgcagcccagaatctcaaggcactagaggcggtgtcttaattaattggcttcacaaagacaaaatgctctggactgggatttttcctttgctgtgttgggaatatgtgtttattaattagcacatgccaacaaaataaatgtcaagagttatttcataagtgtaagtaaacttaagaatcnaagagtgcagacttataattttcaaaa

SEQ ID NO: 295 - DNA, 4439 bp, Homo sapiens
  misc_feature: Incyte ID No: 407877.3
  unsure 3242-3265: a, t, c, g, or other
gaagttgttccatgaactctgccctgtgagacggtcgcatcgacagaggaagtactgtgtggttttattgactgctgagactaccaagttgagcaaaccctttgaggctttcctgtcctttgccctggcaaacactcaagacacagtgagatttgtgcatgtctacagcaatcggcagcaggagtttgccgacaccttactaccagacagtgaggcgtttcaagggaaatcagcggtgtctattttagaaaggcgcaacacagcaggaagggtggtgtataaaaccctggaagacccttggattgggagtgagagtgacaaatttatcctcttgggctatctcgaccagctgcgtaaagatccagctcttctgtcctctgaagcagtgcttcctgacctgaccgatgaacttgcccctgtttttctccttcgatggttctactctgcttctgactacatctcagactgctgggatagcatttttcacaacaactggagggaaatgatgcccctgctgtccctgatcttctctgccctcttcatcctcttcggcactgtcatcgttcaggctttcaggtaaatgtcctgtggcttctcggtgcaccaccatggttggtgttgacactttttttgtaaaactccttttttcttactttagcgactctaatgatgagcgagagtcaagccctccagaaaaagaggaagcccaagagatagactgggtaaactgagccaagcttcaccaaagaaaacagcaggtttctctaactaatacacctagactcacctccccggcacctgccccccagatcctgtcatctgataacgcagcattggaacatagagtgtagagaagaactctcatgcacctcctcccatgtaaactgtggctacagggaaaagtcactgtgatttgtgtttactaagaccctgtaggtgtttagatgccttagatttcataatgaaggcagaaggaaagaagcctatcaggcaagtgttaggtgagccagaagcaggacgtggtttatccctgtaaatgtcaatgaacgtaaccagtcttgtgcgcacacacacccagcagcaagaggccagggtctccgagacaaagaacatagactgaatgatagttgtcttcttcattctgtcctagagcaacttctgcacctgaaaagcagcatcaagcgtgagccaccactcccggctaagttagtatttctttaatcttaatgctttaaactaagccacttggatcctgaataatttaaatcttgagctacattggtaagtaataaattatttaaggccaggaattcctgtagttttcatggagtctgtagctttattaaaaaataaatcactgccaggcttcattcttccatatgatcctctaaaaatggacacttcctctgaatgctgtatctcatggcacctggtccaactagaaatggtcaaggaattcatttggctccttgatacatcagtcctcaatattactttctaggtattttatggccagattgcttatatgagtggtcttttggtttggtagtaggtttttatttttaatttctgtactaatgaaattcctgactttaatttctgaaaaccaaaaactctccaagtgtatttatttatattttttttaatagagacgaggtcttgctatgttgcccaggctggtcccaaactcctggcctcaagcagtccttccaccttggcctcccaaagtgctgggattatcaatatgagccaccatgccagatttgttcatttttaaatatttttatctcttcaagtcatcttttgatcttttaaaaagcaccttcaaacagctgcaccttccatttgcactaggaaatgaaggtagtgatgggattggcaatgttcctggcagatgtttcagcccaaaagctcttctacagaccggtttagagctggtgccctatgagaatattagggagcttttattttaaattgaactttacccttgtccatgcaaggcattcctcctgaatgcatccatgaatttgtttacttttgcgtcaaacatatgagccattgtcatgctcagcctgtgccaccattgctctgtctgatgtatgtaatcatacaagacctgattttggttctaacacagtggtctttgactatcaacattgatgtttttagagatgggttcttctggttgatacagactatgcattgcgtttagcagatggggtaaaactggcctaaaacaagtctttgcagaatacatgccaatttccaaaataaaaaaaaaatttgttgctcaggtgttgcacaatttttatctaacactgaggctatcagctccaactaaacaacatttcagtgggtgaggctgccctaacttccattaggggccatggtctcactgccatcacttattagccatgagaatttggttgtagttttcaggtaggttggtttcttcctcatttgcagcttgttgatacttgttcctttttatttattaacatcccaatcaatttgcagctgccatcattacataaatatttttctgttataaaaagaagtgtgatctgtttttttagtgatttcctttgtttgggaatagagattggaagcacatactcagacctgttttgttaactagaattctttaaaagctgatgccaaacatctttacagaggaactgtagttcacatccacctgtctgacattgtcccctaaaaacaagtgcagtgtggcagctgctgaatctgtctgttcagtttgtcaaggaggataattatgcttgggagagatctgaaaagaaggtgaatattttgcacttttgatactcttaggaacaaataacttatttggcaaattgtttcttttttatgttttgggtgttgtttttgttttttgactttttttgtattgtgaacaggcactgaagctgatgttattttaagattacagaatggaaaaagaaataaactattttaatgtctgataattatggggtaagcccttgcattgcaagatgatgatttgattatggacacattatcaacagaattgaatttgcatggaactcaagacacgcttaagatcaccacagcataactgcagatttcaggaattacagtcatagaggcctctgagcaagaagtttcttcattaggctctccgtgttactttatactttttacttacgttcacagtggtcctaaaaccaagatgcagccctaagcacctcataggagaagcnnnnnnnnnnnnnnnnnnnnnnnngagatggaatgcttatacagtattatttcatagtttttttaaatgtcatgtttctaatgtttagataatcttgaaagaaattctcctcacttcccctttatcctccatctttcatcaaaggaaaaaaaatcaaagcagtacaagtactcctttttttttcccccaattaatccaagttccttagaaatgttgctgtttgggtgagaattctactgattatcccgacttcacagccagcaatgacactttcagcagaaagttttcttggcataaactctttagttctcagactgcttactcataagttcttcttgagaacttgtcagcgacgcaatctgttttgtcttgaagagcacaagactcagacggttgtcactttggggagagcacatagcatctcaaacagcaggttagccgccagcagggctgtgttcccagaaagatcatacggtggtgaaacttcgacaagatcacagcccatcacgttcaggccttgacaacccctgatgatctccagagcctgactaggagtgagaccagcaatttcaggtgtccctgtccctggcgcataggcaggatccagagcgtcaatatcaaagctgatataaatgggtttgcctcccatctgctgcctgacttcccccatcagaggaaccagcgacttcatccagcagtcttcagccaggactacccggaagccctggctccggttgtatctgtagggatccaaggtcgtggaagagccccggatgccaatctgcaccacacgcttacagtccaggagaccctcatccacacaccggcggaagggcgccccgtggtagagcttctctcctagggccttgtcggtcgtgtccgtgtgcgcatccacgtgcagcagccccactgggccatgcttttttgccatcgcttgcaatatgggatatgtgattgtgtgatctccacccaaggtcagaggaatacagccagctgctacaattttctcataggcctcttgaattcgccggcagctgtcctgaaggttgtaaagattgacattcacatcgcctaggtctgcaaccatgagggactggaaggggagggcccccgtgctaggattgactgtcccaagcatcactgattcttcccggatgcggcgaggtccgaatctcgccccaggccggttggaggtccc

SEQ ID NO: 296 - DNA, 4346 bp, Homo sapiens
  misc_feature: Incyte ID No: 378091.1
  unsure 3778, 3890-3891, 3896: a, t, c, g, or other
cggccccggagacaccggaaggagccgcggctgctgcgggaagtggccagttcaggaggcggaccccccgagggcagcgctgcggggccgttttccggccctcctgacgcgacactgcccctctccgagagctgagaaggaaaagaggagcttgcggaggtgcggctgcaggccgttgttggtcgagctggcgggtcccgcgggccaggccgtggaggtgttacctcattttgaaagtcttgggaaacaggaaaaaattcctaacaaaatgtcagcttttcgaaatcattgtccacatttggattcagttggtgaaataacaaaagaagatttgatacaaaaatcccttggtacttgtcaggattgtaaagtccaaggaccaaatctttgggcatgtctggagaatagatgttcatatgttggctgtggtgaatcacaagtagatcacagcaccatacattctcaggagacaaagcattatctaactgtgaaccttaccactcttcgagtatggtgttatgcttgcagcaaagaagtatttttggataggaaattaggaactcagccttcattgcctcatgtaagacaacctcaccaaatacaagaaaacagtgtccaggattttaaaatacccagtaatacaacattaaaaactcctctggttgccgtatttgatgatctggatatagaagcggatgaagaagatgaacttagggccagaggtcttacaggtttgaaaaatattggaaatacttgttacatgaatgcagctttgcaggctctttctaattgcccacctttgacacagttttttcttgattgtggaggactagctcgaacagataagaaacctgccatttgtaaaagttatctcaaactaatgacagagctgtggcataaaagcaggccaggatctgttgtgcctactactctgtttcaaggaattaaaactgtaaatccaacatttcgggggtattctcagcaggatgctcaagaattccttcgatgtttaatggatttgcttcatgaagaattgaaagagcaagtcatggaagtagaagaagatccgcaaaccataaccactgaggagacaatggaagaagacaagagccagtcggatgtagattttcagtcttgtgaatcttgtagcaacagtgatagagcagaaaatgaaaatggctctagatgcttttctgaagataataatgaaacaacaatgttaattcaggatgatgaaaacaattcagaaatgtcaaaggattggcaaaaagagaagatgtgcaataagattaataaagtaaattctgaaggcgaatttgataaagatagagactctatatctgaaacagtcgacttaaacaaccaggaaactgtcaaagtgcaaatacacagcagagcttcagaatatatcactgatgtccattcgaatgacctgtctacaccacagatccttccatcaaatgaaggtgttaatccacgtttatcggcaagccctcctaaatcaggcaatttgtggccaggattggcaccaccacacaaaaaagctcagtctgcatctccaaagagaaaaaaacagcacaagaaatacagaagtgttatttcagacatatttgatggaacaatcattagttcagtgcagtgtctgacttgtgacagggtgtctgtaaccctcgagacctttcaagatctgtccttgccaattcctggcaaggaagaccttgctaagctgcattcatcaagtcatccaacttctatagtcaaagcaggatcatgtggcgaagcatatgctccacaagggtggatagcttttttcatggaatatgtgaagaggtttgttgtctcatgtgtccctagctggttttggggtccagtagtaaccttgcaagattgtcttgctgccttctttgccagagatgaactaaaaggtgacaatatgtacagttgtgaaaaatgcaaaaagttgagaaatggagtgaagttttgtaaagtacaaaactttcctgagattttgtgcatccaccttaaaagattcagacatgaactaatgttttccaccaaaatcagtacccatgtttcatttccgctagaaggcttggatcttcagccatttcttgctaaggatagtccagctcaaattgtgacatatgatcttctgtcagtcatttgccatcatggaactgcaagtagtggacactatatagcctactgccgaaacaatctaaataatctctggtatgaatttgatgatcagagtgtcactgaagtttcagaatctactgtacaaaatgcagaagcttacgttcttttctataggaagagcagcgaagaggcacaaaaagagaggagaaggatatcaaatttattgaacataatggaaccaagcctccttcagttttatatttctcgacagtggcttaataaatttaagacctttgccgaacctggccctatttcaaataatgactttctttgtattcatggaggtgttcctccaagaaaagctggttatattgaagacctggttttgatgctgcctcagaacatttgggataacctatatagcaggtatggtggaggaccagctgtcaaccatctgtacatttgtcatacttgccaaattgaggcggagaaaattgaaaaaagaagaaaaactgaattggaaatttttattcggcttaacagagcgttccaaaaagaggactctccagctactttttattgcatcagtatgcagtggtttagagaatgggaaagttttgtgaagggtaaagatggagatcctccaggtcctattgacaatactaagattgcagtcactaaatgtggtaatgtgatgcttaggcaaggagcagattctggccagatttctgaagaaacatggaattttctgcagtctatttatggtggagggcctgaagttatcctgcgacctccggttgttcatgttgatccagatatacttcaagcagaagaaaaaattgaagtagaaactcggtctttgtaatttttaggatgtagagagttctaatgaggaatcattttcatgtgccctgacatgtacacatgcgaaaacattcctaaaagcgtgtttatttgctttattttttttcatcatttatcccatttatttcttcttagtgggcattatggaagaatatattaaaatgtgtaatataccacaggttggtatatttagttttaaatacttaccataaagtctttcagtgtaatttttttttgagacagagtcttgctttgtcacccaggctggagtgctgtggtgttacctcagctcactgcagcctccacctcctgggttcaagcgattctcctgcctcagcctctcgagtagctgggattacaggcacctgccaccatgcccggctaattttagtattttagtagagatggggtttcaccatgttggccaggctagtctcaaactcctgacctcaggtgatccacccacctcgggctcccaacagtgctgggattacaggtgtgagccacagcgcctggcccagtgtaatatcttcgaaagcaggagggacaattgtgaaatcagtaggttatctttaatctttacactacatgcagatccatagtatcctttgtagtgttgtaaatactttgctttgaaaactttttcatgtcctaaatcaccctgactctgaccagtctttcagttctccaaaagcccaatttaattgtatagtttgtcatggcttcatataataaagagcctattttaagttgaaagtagtagtcagaaaattgntaatttcctaaagctcaggaaactagggtgcactttttttgcactgcagcatatacactaactagcttattaaaatttacaaaatgctttttgaatgtatcaaggatatatnnaggtngagtggaatttgcagcagatatcagtaacttattgccgcttatattgtacaatgttaaacttcaattcctgtaacctggttagtattaatgtcagtgactaaaaaacttagagttagttttagggcacctttttattttgagagccatgaagtgtggaatgtgtccacctacgattgttgataaagctgaggcccacttgcaacttgattttttaaatgaaatagataaagtcctttttgaataatatagtatgcactgcctatttgccttgattatgtaatgtcaaaagtttaactatattccaagtacaaaaacatactggattacattgaggatgttgaatagcattcatgatggctttgttttggtttggggtcagctgtcaccagctaaagcaatgttgttaaaattagctcaataaaaatgtctttaaaatgtaaaaaaaaaaa

SEQ ID NO: 297 - DNA, 6796 bp, Homo sapiens
  misc_feature: Incyte ID No: 903943.2
  unsure 76, 3009: a, t, c, g, or other
gcggggcggaacgcgccgggcgggctccaccgcgccgtgtgcttccgcaggttgcgggggtcgctggggccttgtngcggggcagctccgcggggcttcgcccgctctctcacctcgccgtgctctctcgcggcggccggcggggcccgcgctgcagccggagacccggagaaaggtgaagaactgaatgtcatcatgtctggaatcaagcgaaccatcaaagaaaccgaccctgattacgaggatgtatctgtggcccttccaaataagcggcataaagcaattgagaattcagctcgagatgctgctgtgcagaagattgagactattatcaaagaacagtttgctcttgaaatgaagaataaggaacatgaaattgaagtcattgaccagcgactgattgaagcaagaaggatgatggataaactgcgtgcctgcattgtagcaaactactatgcttctgcaggtcttctaaaagtttctgagggatcaaagacatgtgatacaatggtttttaatcatcctgctatcaagaaatttttggaatcaccatctaggtcatcatctcctgccaatcagagagcagaaacaccatcagccaatcattcagaaagtgattctttatctcagcacaatgacttcttatctgacaaagataataacagcaatatggatatagaggaaagactctcaaacaacatggagcagagaccaagccgaaatactggaagggatacttctagaattactggctcccataaaacagaacagcggaatgctgatctcacagatgagacttcacgactttttgtaaagaaaacaatagtagtgggcaatgtgtccaagtatatacctccggataagagggaagaaaatgaccagtcaactcataagtggatggtatatgtccgagggtcccgtagagaacccagcattaatcattttgtcaagaaggtttggttcttccttcatcctagctataaaccaaatgaccttgtggaagttagagagcctccttttcacctgaccagaagaggctggggtgagtttcccgtcagagttcaagttcattttaaggacagccagaacaagcggatagatatcatacataatctgaagctggatagaacttatactggcttgcagactcttggagcagagacggtagtggatgttgaactccatcgccattctctcggagaagactgtatctatcctcagtcctcggagtctgacatctctgatgcccctccatctttgcctttgaccattccagccccagtgaaagcttcttcaccaataaagcagtcacatgagccagtacccgatacctctgtggagaaagcaggattcccagctagcactgaagctgaacgacacactccgttttatgctttgccatcttcattggaaagaacacccaccaaaatgactacatcccagaaagttaccttttgttcccatggcaattcagctttccagccaatagcatcaagctgcaaaattgttccacaaagtcaggttcctaatcctgagtcacctggaaaatccttccagcccatcaccatgagctgcaagattgtgtcaggttccccaatatcaactccaagcccatcaccattgcctcgaaccccgacttccactccagtccacgtgaagcaaggcactgccggctctgttattaataatccttatgttatcatggacaagcagccggggcaggtgattggagccaccactcccagtacaggaagtcctacaaacaagatctccacggcttctcagatctcccaaggaacaggttcccctgttcctaaaattcatggaagtagttttgtaacatctactgtcaagcaggaggattctttgtttgcatctatgccacctctttgcccaattgggagtcaccctaaggttcaaagccccaaacctataacaggaggacttggagctttcacaaaagtgatcatcaaacaggaacctggtgaagcccctcacgtgcccgcaacaggagctgccagccagtcaccactcccgcagtatgtgactgtgaaagggggtcacatgatagctgtgtcccctcaaaaacaggtcataactcctggagaagggattgcccagtcagcaaaggttcagccctccaaggttgtcggggtaccagttgggtctgctttaccttcaacagtgaagcaggctgtggcgatcagtggtggccagatcctggtagccaaggccagctcttctgtctccaaagcagttgggccaaagcaagttgtaacccaaggagttgccaaagcaattgtgagtggaggtggaggaaccattgttgctcagccagtgcagaccttaaccaaggcccaggttactgccgctggtcctcagaagagtggatcccagggttcagtaatggcaacgttgcagctaccagccactaatttggccaacttggcaaatttgcctcctggcactaaactctacctaactacaaacagcaagaacccttcaggaaaaggaaaactgctgctgatccctcaaggagccatcctgcgagctacgaacaatgctaatctccagtctggctcagctgccagtggtgggagtggtgccggaggaggaggaggaggaggaggaggcggcagtggcagcggtggaggcggcagcacaggaggaggaggaggaacagcaggaggaggaactcaaagtactgctggccctggagggatatctcagcacctgacttacacatcttacatcctcaagcaaactccccagggcacatttttagttggccagccatcaccccagacttctggaaaacaactcaccactgggtcagtggtccaaggaacactgggagtcagcacatcttctgcacaaggacaacaaacgctaaaagtcatctctggacagaaaaccacattgtttacacaggcagcccatggaggacaggcatctctaatgaaaatatccgatagcaccttgaagactgtgccagccacctcacagctntcgaagcctggaaccacaatgctgagagtagcaggaggggttatcacaactgccacttcccctgccgtggccctctcagcaaacggtcctgcacaacagtctgaaggaatggctcccgtgtcttcatcttacggttcagttctgtaacgaaaacttcttgggcagcagcaagtgtgtgtgagccaggccaccgtgggaacctgcaaggctgccacccccaccgtcgtcagcgccacgtccctcgtgcctacaccaaaccccatctctgggaaagccacagtatccggactgttaaagattcactccagtcagtccagtccgcagcaggccgtcctgacgattcccagccagctcaaaccactcagcgtaaacacatctggaggggtgcagacgatcctgatgcctgtgaataaagtggttcagtcattttctaccagcaagccacctgccattctgcctgtagctgccccaactccagttgtccccagctctgctccagcagctgttgcaaaagtgaagactgaaccagaaacacctggaccgagttgcctctctcaggagggtcagacagcagtgaaaacagaagaaagttctgagctgggaaactatgtcattaagatagaccatttagaaactatccagcaactcctaactgcagtagtaaagaagattccattaatcactgcaaaaagtgaagatgccagctgcttttctgcaaagtctgtggagcagtactatggctggaacattggaaaaaggagagccgctgagtggcaaagagcaatgacaatgcgaaaagtcttacaagaaatcctggagaagaatccgagatttcaccacctgactcccctcaaaaccaagcacatcgctcactggtgccgctgtcatggctacaccccaccggaccctgagagcctgaggaatgacggggactccatcgaggacgtgctgacccagatcgacagcgagcccgagtgcccatcatcattctcctctgctgacaacctctgccgcaaactggaggacctgcaacagttccagaaaagggaacccgagaatgaggaggaggtggacatcctcagcctctccgagccagtgaagataaacatcaagaaggagcaggaagagaaacaagaggaagtcaagttctacctgccaccaaccccagggtctgaatttattggggatgtcacacagaagattgggatcaccctgcagcccgtggcactccacaggaacgtgtatgcgtccgtggtggaggacatgatcctgaaggctacagaacagctggtgaatgatatcctgagacaggctttggcagttggataccagacagcttctcacaacaggattcccaaagaaattacagtgagtaatattcaccaggccatttgcaacattccttttctggacttcctcacaaacaaacacatgggaatattgaatgaggaccagtgagcggagtgaggtgccctggagaagcaggctttgaaggcacagcgaagctgtaactgaggaccctgctgctcgggaaggaggtggtttccagtgtgactcggcatgtcatggctacccaacctttgccgctgcctgttcccacgtgtcaccagcacgctgcactccagatgaaatcctcctaggacaggagtttgtttcctgagtgtggagtgaggctgtcagtggatccgtgctttgtcggccagcgtttctgcagtctttgtaaaggccccacgagagcgggccaggccgtgtgcctcaggcccttctccctgggtgtgcttaagggggctccttgggcccgcctccccaggaggtagaaaatgagtggcaggctagagatttcacccattttgtgggctggagttaccagtagctccagcagttaccctgaagagagattgggcttcagccttcagcaggtggttctctcccatgcctggccttggtgtggaggggctgtactctgagcccaagtgagtcagctataggaagaggccatacctagagccaagaaccatgaaggcctgagagacggcagactgagcagaattccttttttgagcacgagagcattactagaaccattgtcaaagcagtggcaagggacggagaggtcccaacaggagtcaggaagaggtttgattataaccaagaaaactcactatgctaggaatagactgtgtgcaccagtcccagacacttggcagaagtgtagcagcgttacacatgtgtgcgaagcagatcgcaggttccacgccatctgcatggcctgcaggagcttctgctgctgaccccatgctgagtggccagtggggagcggcgcccggcaggctcttctggggtcgtctgtcctatccgtggattgtatatactcttctctgttaaggagtttttcccaagaagaaaagtatttaaaagaaataccagtgagtgccttaaagttggagaagtaactgcccatgcccagaaataaggatgccagtgcccagaagcagtgagattagtctgtgtccacaagcagaggccccctcgatgggagggagtggcaggcaggagaaggtggcgctgccaggtgcccgggtctattggaggcgccccatctcagacttcctaacacagcctgtgtggaaggcagaacaaagaatgcatgcccagtcagaaatctgttctattctgctccaggaaaatcggaaacctgtgagtcagagtcagagaaacttacccaagcaacgtaattcctgttttcatgggtcctgtagatgtttgagtcaggaaggtaaggcggggagtgactgaataaactctgccttttaaattgagcatctgggccgggcatggtggctcacgcctgtaatcccagcactctgggaggtcgaggtgggtgggtcacctgaggttgggagttcgagaccagcccgaccaacatggtgaaaccccgtctctactaaaaatacagaaaattagctgggcatggtggtgtgtgcctgtaattccagctactcgggaggctgaggcaggaagaatcacttgaacccaggaggcggaggttgcagtgtgccaagatcataccactgcactccagccctggtgacagaggagaccccgtctcaaaaattgattgatcaattcagcatctgagggctgcaagtacagaaggaatctattctcagcagggcatagggcacgcactggcttaacagtttagtatataaggctcaaatagtctatacctgaactgctataagcaaggtcgatagggaagtggatagattgcttcagcaaagtgaactgtgagatctccaggacagagggagaaagatctgatccaaatgagaacagattggttattgcaggtatcacagcctaaagaaattatctttttgcaccaactttcaagtaaaattaacatctgacttttgtttggtatttattaaaaatcttttagtcacttgttcaaaattttataaaggataagttcataacttatctttaaagcaaacaaaacaacacagtataattttctacgtggccctcactgaatccctccaaccccatcatcaaactctatacacttattttagaaaaacaaacgcatttataatagatgattattatacatataatttggtgaaaaaaggaagaaataaacaatttaagagcagaaagaagagcctaagatattttaagtaattcaggggaagaaattaggaaattcaatggaagaaaaatacaacagagactggattgtccaaaagattataaacacaatttaggaggcccacaaagc

SEQ ID NO: 298 - DNA, 1627 bp, Homo sapiens
  misc_feature: Incyte ID No: 979241.5
  unsure 688: a, t, c, g, or other
ccacaattagcaaccagtttcagacattttttgccaagctgccttgtgttttacctctgaagtgttctttagattccagtttaagaattatgatttgcctcttgaagatcccttctaccaatgctacaaggagtttgttggaaccattttcaaaactgctcagctttgtaattcagaatgccgtcttcactctggcctacctggtggagctgtgtggcttatgttaccgagctttcactaaggaacgagataaattctacttgtctcgtagtgttgttctagaacttctgcaggccctaaagctcaaatctcctttaccagatacaaaccttcttctgcttgttcagtttatttgtgcagatgctggaaccaaactagctgagtcaacaatcctgagcaagcagatgatagcctctgtacctggatgtgggactgcagcgatggagtgtgtgaggcagtacatcaacgaagtgctggatttcatggcagacatgcacacgctgaccaaactgaagagccacatgaagacatgttcccagcctctgcatgaagatacctttgggggacatctcaaagtggggctggcccagattgcagccatggacatctcacggggcaaccacagagataacaaagctgtgatccgctatctgccttggctttatcatcccccctctgcaatgcagcnaggactaaagaattcatgagtgtgtctcccatatccgactgttgtcctggctgctgctgggttccctcactcacaatgcagtgtgcccaaatgcctcctctccctgcctgcccattcctctggatgcaggctcccacgttgcagaccatcttattgttatcctgattggatttccagagcaatcaaagacctccgtgctgcacatgtgctccctcttccacgcgttcatctttgctcagctgtggacagtttattgcgagcaaagtgccgtcgctacaaatctccaaaatcagaatgaattcagcttcacggcgatactgacagcactagaattttggagtagggtgacacccagcatccttcagctaatggcccataacaaagtgatggtagaaatggtgtgtctccatgtgattagtttaatggaggcattgcaggaatgcaattcgaccatttttgtcaagctgatacctatgtggttgccaatgattcagtcaaatatcaagcacttatctgcgggactccagcttcgcctccaggctattcagaaccacgtgaaccaccacagcctaaggacgctgccgggctcgggccagagcagtgctggcctggcagccctccgaaagtggttgcagtgcactcagttcaaaatggcccaggtggagatccagtcctcggaagcagcctctcaattttatcctctatgagtggactcctcggcgctcagtgtcaacactctggtttagcaataatgggtttaaaaacaaacaatttgatccaagcaggttggggaacatattggtactgtacattctctttctagtttagtaaaagatgtgcaaaggccagagagggccgaaaatgaagctttcttgctacacatatttctgatgactccttgggctatctgattaagtgttccttacattttttttaaaa

SEQ ID NO: 299 - DNA, 5848 bp, Homo sapiens
  misc_feature: Incyte ID No: 055290.15
gctcgcgctgaggtgcgtcggtgcccggccccccgcgcccccgcgcgccgcggctcctgttgacccggtccgcccgtcggtctgcagcgcggctgaggaaacttggctgtaacttcaaaagaagatttgattctttatttctggactgcatatatatatataacaaggccattaaaatgtcgggagcctcagtgaaggtggctgtccgggtaaggcccttcaattctcgagagaccagcaaggaatccaaatgcatcattcagatgcaaggcaactcgaccagtattattaacccaaagaatccaaaggaagctccaaagtccttcagcttcgactattcctactggtctcatacctcacccgaagatccctgttttgcatctcaaaaccgtgtgtacaatgacattggcaaggaaatgctcttacacgcctttgagggatataatgtctgtatttttgcctatgggcagactggtgctggaaaatcttatacaatgatgggtaaacaagaagaaagccaggctggcatcattccacagttatgtgaagaactttttgagaaaatcaatgacaactgtaatgaagaaatgtcttactctgtagaggtgagctacatggaaatttactgtgaaagagtacgagatttgctgaatccaaaaaacaagggtaatttgcgtgtgcgtgaacacccacttcttggaccctatgtggaggatctgtccaagttggcagttacttcctacacagacattgctgacctcatggatgctgggaacaaagccaggacagtggcagctacaaacatgaatgaaacaagtagccgttcccacgctgtgtttacgattgttttcacccagaagaaacacgataatgagaccaacctttccactgagaaggtcagtaaaatcagcttggtggatctagcaggaagtgaacgagctgattcaactggtgccaaagggactcgattaaaggaaggagcaaatattaataagtctcttacaactttgggcaaagtcatttcagccttggccgaggtggataactgcactagcaagagtaaaaagaagaagaaaacagattttattccctacagggattctgtacttacttggctccttcgagaaaatttaggtggcaattctcggactgcaatggttgctgctctgagccccgcggatatcaactacgatgagactttgagcactctgagatatgcagatcgtgcaaaacaaattaaatgcaatgctgttatcaatgaggaccccaatgccaaactggttcgtgaattaaaggaggaggtgacacggctgaaggaccttcttcgtgctcagggcctgggagatattattgatattgatccattgatcgatgattactctggaagtggaagcaaatatctgaaagattttcagaacaataagcatagatacttgctagcctctgagaatcaacgccctggccatttttccacagcatccatggggtccctcacttcatccccatcttcctgctcactcagtagtcaggtgggcttgacatctgtgaccagtattcaagagaggatcatgtctacacctggaggagaggaagctattgaacgtttaaaggaatcagagaagatcattgctgagttgaatgaaacttgggaagagaagcttcgtaaaacagaggccatcagaatggagagagaggctttgttggctgagatgggagttgccattcgggaagatggaggaaccctaggggttttctcacctaaaaagaccccacatcttgttaacctcaatgaagacccactaatgtctgagtgcctactttattacatcaaagatggaattacaagggttggccaagcagatgctgagcggcgccaggacatagtgctgagcggggctcacattaaagaagagcattgtatcttccggagtgagagaagcaacagcggggaagttatcgtgaccttagagccctgtgagcgctcagaaacctacgtaaatggcaagagggtgtcccagcctgttcagctgcgctcaggaaaccgtatcatcatgggtaaaaaccatgttttccgctttaaccacccggaacaagcacgagctgagcgagagaagactccttctgctgagaccccctctgagcctgtggactggacatttgcccagagggagcttctggaaaaacaaggaattgatatgaaacaagagatggagaaaaggctacaggaaatggagatcttatacaaaaaggagaaggaagaagcagatcttcttttggagcagcagagactggacgcggattctgatagcggggacgattctgacaagaggtcgtgtgaagagagctggaaactgattacttctctgagagaaaagctacctcccagcaagttgcaaaccattgttaaaaaatgtggcctcccaagcagtgggaagaaacgtgaaccaattaaaatgtatcagataccccaaagaaggcgcttgagtaaagattccaagtgggtcacaatctcagatcttaaaattcaggctgtcaaagagatttgctatgaggttgctctcaatgacttcaggcacagtcggcaggagattgaagccctggccattgtcaagatgaaggagctttgtgccatgtatggcaagaaagaccccaatgagcgggactcctggagggcagtggccagggacgtctgggataccgtcggtgttggggatgagaagatcgaagacgtcatggccactgggaaaggcagcactgatgtagatgacctcaaggttcatatagacaagctggaagatattttgcaagaagtcaaaaagcaaaataacatgaaagacgaggagataaaagtcttaagaaataaaatgctcaaaatggaaaaagtcttgccactgatcggatctcaggaacagaaaagcccaggaagccacaaagcaaaggagcctgttggtgctggtgttagtagcacctctgagaataatgtaagtaaaggagacaatggagaacttgcaaaagaagaacgtgtttcccagctgatgaatggggatccagcttttagacgtggacgtctgcgctggatgaggcaagagcaaattcggtttaagaacttgcaacagcaggagataacaaagcagcttcgtcggcagaatgtacctcataggttcatccctcctgagaaccggaagccccgcttcccctttaagagcaaccctaaacacagaaactcttggagtcctgggacacatatcatcataacagaagatgaggttatagagcttaggattccaaaagacgatgaagcaaggaaagggaataaagaagagagccaagaaaaagggggtaaaggagcttttaaggatccccagtttccatggggctctcaaggaatgagaagtcaagatcacatccaagttagcaagcagcacattaataatcagcaacagccacctcaactacgttggagaagcaattctctcaataatggccagcccgaaaagtacgcgctgccaggcatctgcctccgcggagtcattaaactcccacagtggtcaccccactgctgatgtacagactttccaggcaaagcgccatattcatcaacaccgtcagtcttactgtaattataacactggaggtcagttagagggcaatgcagccacttcctatcagaagcagactgacaaacccagccactgtagccagtttgtgacacctccgcggatgaggagacagttctcagcacccaatctcaaagctggtcgagaaaccacagtataaatcagttactggacaaacttgaaatcatggtggaagaaacagacagtgttagctcatgatttgatttggttctacctttggccttgagttcttattatttacattataaatattaactggttttatattgttaagacaaaacactggtaaaagtttcaacacctcccttttgcttgtataccataaatgggcagtttctgaaattttggataaagcatcaagaactcctttttctgaaacgttcctccttttttagtgcctaattaatatacttacttacacagacttgtcccatcttgatgtaagtttgttatgtttttataatgcctataaattaatctgacatccagaaagacctgcctcttagtttatgcagacattcaaaaggagaatttgataagcagaattaaatgtctgttattcataaatgttagaaattggtttaaaaataataacatgcaactgggtgggcacagctttggatttctcatccacgtctgttcccttctttaaatatgattagaattttcgtaagccaaaactaaaggtcttcaaacatatcttgcaatacatagctttgcatcttccacacaacttccacgtcttcttttattctgtattttacaaaaaactcatataatggttttttcttttgaatgtatcagaatatgtatgaaatttgtcatatcagaatctataaattggcactgtgtctgggattctgtttgtggtttgcattttgaagttcaatgtatcatttgacacacatgcacacaaagtgaactattcaccaaaatcatgccaacagaaataccaacaaaaaacttgtgtagcttgtaaggaggttatttggcttgagagggaagaggtgggacagacatgggggacaaagctacagcatatggctctgtggtgctgcttttttccaatagttgatgaaatagtgaaataaaagttaactttggttgggcttggaataaaggagatgatacataataaactattctttggttagcattagtaatgcttgtagacactcaaacaaggaaggcgaagtcctgatgatgatttattgtatcaatacctcattttatttggttgtggtctcagtttgcctcactggagaatccactaagaaagatggattttaatgggaagaaaagaattattttctacatcgttcctcatctcttgagtttgtcaaaaagttttctaagaggcagtgtgaagagccagagatgtccgaaattgcctgacttcatgttttggaagattcctaagtcacatgaaatcatctatcaaacacttgtcttccaaacggtgtgaaaaactacagccaagatagcagttagcattcaaggaagccttaaagattgtgattatgtttttttttcctttgcgtgtgggcactatgctttattagaacacattatttttaatcatagtattttttctttgcctctaagaaaatactttcttaatgctcagaaagttgcttccaattaatgtttttttccccttaaaaagagaagctttgagagatatttttgctttcatagctagaacagttgaagtcttcaactgaggttttatagcagattagacatgggtaaatgatgtctgtaatgggttgagttactgagatgacaatctcctgtgccatttggtttgaatgtacttgataggctgcttcaaatcagtcacttcaatgcattttgtgtaaacccagttgtccttttttattcctctttagacataaatgtgctaactattcctttctatacacaatttattttctaagattaaaaataagtaattgctaggtttggtggcacatgcgtacagcgcccagctacttgaggaggctgaagcaggaggatccctagagcccaggagttctgggctagtggtacactatgccagttgggtgtaagtttggcatcaatatggtgatgtccctgaagcaggaaaccacaaacttgcatcaggacgggtgaacccagcccaggttggaaatggagcaggccaaaactcccaggctgatcagtaatgggatcttgcctatgaatag

SEQ ID NO: 300 - DNA, 2899 bp, Homo sapiens
  misc_feature: Incyte ID No: 2083528CB1
caccgcccctactcccgggctgccgccgcctccccgcccccagccctggcatccagagtacgggtcgagcccgggccatggagcccccctggggaggcggcaccagggagcctgggcgcccggggctccgccgcgaccccatcgggtagaccacagaagctccgggacccttccggcacctctggacagcacaggatgctgttggccaccctcctcctcctcctccttggaggcgctctggcccatccagaccggattatttttccaaatcatgcttgtgaggaccccccagcagtgctcttagaagtgcagggcaccttacagaggcccctggtccgggacagccgcacctcccctgccaactgcacctggctcatcctgggcagcaaggaacagactgtcaccatcaagttccagaagctacacctggcctgtggctcagagcgcttaaccctacgctcccctctccagccactgatctccctgtgtgaggcacctcccagccctctgcagctgcccgggggcaacgtcaccatcacttacagctatgctggggccagagcacccatgggccagggcttcctgctctcctacagccaagattggctgatgtgcctgcaggaagagtttcagtgcctgaaccaccgctgtgtatctgctgtccagcgctgtgatggggttgatgcctgtggcgatggctctgatgaagcaggttgcagctcagaccccttccctggcctgaccccaagacccgtcccctccctgccttgcaatgtcaccttggaggacttctatggggtcttctcctctcctggatatacacacctagcctcagtctcccacccccagtcctgccattggctgctggacccccatgatggccggcggctggccgtgcgcttcacagctctggacttgggctttggagatgcagtgcatgtgtatgacggccctgggccccctgagagctcccgactactgcgtagtctcacccacttcagcaatggcaaggctgtcactgtggagacactgtctggccaggctgttgtgtcctaccacacagttgcttggagcaatggtcgtggcttcaatgccacctaccatgtgcggggctattgcttgccttgggacagaccctgtggcttaggctctggcctgggagctggcgaaggcctaggtgagcgctgctacagtgaggcacagcgctgtgacggctcatgggactgtgctgacggcacagatgaggaggactgcccaggctgcccacctggacacttcccctgtggggctgctggcacctctggtgccacagcctgctacctgcctgctgaccgctgcaactaccagactttctgtgctgatggagcagatgagagacgctgtcggcattgccagcctggcaatttccgatgccgggacgagaagtgcgtgtatgagacgtgggtgtgcgatgggcagccagactgtgcggacggcagtgatgagtgggactgctcctatgttctgccccgcaaggtcattacagctgcagtcattggcagcctagtgtgcggcctgctcctggtcatcgccctgggctgcacctgcaagctctatgccattcgcacccaggagtacagcatctttgcccccctctcccggatggaggctgagattgtgcagcagcaggcacccccttcctacgggcagctcattgcccagggtgccatcccacctgtagaagactttcctacagagaatcctaatgataactcagtgctgggcaacctgcgttctctgctacagatcttacgccaggatatgactccaggaggtggcccaggtgcccgccgtcgtcagcggggccgcttgatgcgacgcctggtacccgtctccgccgctggggcttgctccctcgaaccaacaccccggctcgggcctctgaggccagatcccaggtcacaccttctgctgctccccttgaggccctagatggtggcacaggtccagcccgtgagggcggggcagtgggtgggcaagatggggagcaggcacccccactgcccatcaaggctcccctcccatctgctagcacgtctccagcccccactactgtccctgaagccccagggccactgccctcactgcccctagagccatcactattgtctggagtggtgcaggccctgcgaggccgcctgttgcccagcctggggcccccaggaccaacccggagcccccctggaccccacacagcagtcctggccctggaagatgaggacgatgtgctactggtgccactggctgagccgggggtgtgggtagctgaggcagaggatgagccactgcttacctgaggggacctgggggctctactgaggcctctcccctgggggctctactcatagtggcacaaccttttagaggtgggtcagcctcccctccaccacttccttccctgtccctggatttcagggacttggtgggcctcccgttgaccctatgtagctgctataaagttaagtgtccctcaggcagggagagggctcacagagtctcctctgtacgtggccatggccagacaccccagtcccttcaccaccacctgctccccacgccaccaccatttgggtggctgtttttaaaaagtaaagttcttagaggatcataggtctggacactccatccttgccaaacctctacccaaaagtggccttaagcaccggaatgccaattaactagagaccctccagcccccaaggggaggatttgggcagaacctgaggttttgccatccacaatccctcctacagggcctggctcacaaaaagagtgcaacaaatgcttctattccatagctacggcattgctcagtaagttgaggtcaaaaataaaggaatcatacatctcaaaaaaaaaa

SEQ ID NO: 301 - DNA, 2424 bp, Homo sapiens
  misc_feature: Incyte ID No: 155397CB1
atgccagccccaaacctcatccctagtggaggccttgctgatgtggaagtggccagggccctcatggtaggctgggcagaagcccaagaacaggctctaaagctgctaaacccggcagtcctggtccccggaggctcttgccagtctgacagtgttcttggcactgctcaaaggtcccagcagctggggttccccgtcagcccgtgagcggccatgtccaaccccagcgccccaccaccatatgaagaccgcaaccccctgtacccaggccctccgccccctgggggctatgggcagccatctgtcctgccaggagggtatcctgcctaccctggctacccgcagcctggctacggtcaccctgctggctacccacagcccatgccccccacccacccgatgcccatgaactacggcccaggccatggctatgatggggaggagagagcggtgagtgatagcttcgggcctggagagtgggatgaccggaaagtgcgacacacttttatccgaaaggtttactccatcatctccgtgcagctgctcatcactgtggccatcattgctatcttcacctttgtggaacctgtcagcgcctttgtgaggagaaatgtggctgtctactacgtgtcctatgctgtcttcgttgtcacctacctgatccttgcctgctgccagggacccagacgccgtttcccatggaacatcattctgctgaccctttttacttttgccatgggcttcatgacgggcaccatttccagtatgtaccaaaccaaagccgtcatcattgcaatgatcatcactgcggtggtatccatttcagtcaccatcttctgctttcagaccaaggtggacttcacctcgtgcacaggcctcttctgtgtcctgggaattgtgctcctggtgactgggattgtcactagcattgtgctctacttccaatacgtttactggctccacatgctctatgctgctctgggggccatttgtttcaccctgttcctggcttacgacacacagctggtcctggggaaccggaagcacaccatcagccccgaggactacatcactggcgccctgcagatttacacagacatcatctacatcttcacctttgtgctgcagctgatgggggatcgcaattaaggagcaagcccccattttcacccgatcctgggctctcccttccaagctagagggctgggccctatgactgtggtctgggctttaggcccctttccttccccttgagtaacatgcccagtttcctttctgtcctggagacaggtggcctctctggctatggatgtgtgggtacttggtggggacggaggagctagggactaactgttgctcttggtgggcttggcagggactaggctgaagatgtgtcttctccccgccacctactgtatgacaccacattcttcctaacagctggggttgtgaggaatatgaaaagagcctattcgatagctagaagggaatatgaaaggtagaagtgacttcaaggtcacgaggttcccctcccacctctgtcacaggcttcttgactacgtagttggagctatttcttcccccagcaaagccagagagctttgtccccggcctcctggacacataggccattatcctgtattcctttggcttggcatcttttagctcaggaaggtagaagagatctgtgcccatgggtctccttgcttcaatcccttcttgtttcagtgacatatgtattgtttatctgggttagggatgggggacagataatagaacgagcaaagtaacctatacaggccagcatggaacagcatctcccctgggcttgctcctggcttgtgacgctataagacagagcaggccacatgtggccatctgctccccattcttgaaagctgctggggcctccttgcaggcttctggatctctggtcagagtgaactcttgcttcctgtattcaggcagctcagagcagaaagtaaggggcagagtcatacgtgtggccaggaagtagccagggtgaagagagactcggtgcgggcagggagaatgcctgggggtccctcacctggctagggagataccgaagcctactgtggtactgaagacttctgggttctttccttctgctaacccagggagggtcctaagaggaaggtgacttctctctgtttgtcttaagttgcactgggggatttctgacttgaggcccatctctccagccagccactgccttctttgtaatattaagtgccttgagctggaatggggaagggggacaagggtcagtctgtcgggtgggggcagaaatcaaatcagcccaaggatatagttaggattaattacttaatagagaaatcctaactatatcacacaaagggatacaactataaatgtaataaaatttatgtctagaagtta

SEQ ID NO: 302 - DNA, 2024 bp, Homo sapiens
  misc_feature: Incyte ID No: 1253545CB1
tgaaattattgctattaacaacaccaagttttcatataacgattcaaaagagtgggaggaagccatggctaaggctcaagaaactggacacctagtgatggatgtgaggcgctatggaaaggctggttcacctgaaacaaagtggattgatgcaacttctggaatttacaactcagaaaaatcttcaaatctatctgtaacaactgatttctccgaaagccttcagagttctaatattgaatccaaagaaatcaatggaattcatgatgaaagcaatgcttttgaatcaaaagcatctgaatccatttctttgaaaaacttaaaaaggcgatcacaattttttgaacaaggaagctctgattcggtggttcctgatcttccagttccaaccatcagtgccccgagtcgctgggtgtgggatcaagaggaggagcggaagcggcaggagaggtggcagaaggagcaggaccgcctactgcaggaaaaatatcaacgtgagcaggagaaactgagggaagagtggcaaagggccaaacaggaggcagagagagagaattccaagtacttggatgaggaactgatggtcctaagctcaaacagcatgtctctgaccacacgggagccctctcttgccacctgggaagctacctggagtgaagggtccaagtcttcagacagagaaggaacccgagcaggagaagaggagaggagacagccacaagaggaagttgttcatgaggaccaaggaaagaagccgcaggatcagcttgttattgagagagagaggaaatgggagcaacagcttcaggaagagcaagagcaaaagcggcttcaggctgaggctgaggagcagaagcgtcctgcggaggagcagaagcgccaggcagagatagagcgggaaacatcagtcagaatataccagtacaggaggcctgttgattcctatgatataccaaagacagaagaagcatcttcaggttttcttcctggtgacaggaataaatccagatctactactgaactggatgattactccacaaataaaaatggaaacaataaatatttagaccaaattgggaacacgacctcttcacagaggagatccaagaaagaacaagtaccatcaggagcagaattggagaggcaacaaatccttcaggaaatgaggaagagaacaccccttcacaatgacaacagctggatccgacagcgcagtgccagtgtcaacaaagagcctgttagtcttcctgggatcatgagaagaggcgaatctttagataacctggactccccccgatccaattcttggagacagcctccttggctcaatcagcccacaggattctatgcttcttcctctgtgcaagactttagtcgcccacaacctcagctggtctccacatcaaaccgtgcctacatgcggaacccctcctccagcgtgcccccaccttcagctggctccgtgaagacctccaccacaggtgtggccaccacacagtcccccaccccgagaagccattccccttcagcttcacagtcaggctctcagctgcgtaacaggtcagtcagtgggaagcgcatatgctcctactgcaataacattctgggcaaaggagccgccatgatcatcgagtccctgggtctttgttatcatttgcattgttttaagtgtgttgcctgtgagtgtgacctcggaggctcttcctcaggagctgaagtcaggatcagaaaccaccaactgtactgcaacgactgctatctcagattcaaatctggacggccaaccgccatgtgatgtaagcctccatacgaaagcactgttgcagatagaagaagaggtggttgctgctcatgtagatctataaatatgtgttgtatgtcttttttgctttttttttaaaaaaaagaataactttttttgcctctttagattacattgaagcattgtagtcctggtaagaccagtatttttggtgtttatttataaggcaattgtgggtgggggaaaagtgcagaatttaccc

SEQ ID NO: 303 - DNA, 4575 bp, Homo sapiens
  misc_feature: Incyte ID No: 191925CB1
aagggtacctacggtacctgaaaacaacgatggcatggaaaacacttcccatttacctgttgttgctgctgtctgttttcgtgattcagcaagtttcatctcaagatttatcaagctgtgcagggagatgtggggaagggtattctagagatgccacctgcaactgtgattataactgtcaacactacatggagtgctgccctgatttcaagagagtctgcactgcggagctttcctgtaaaggccgctgctttgagtccttcgagagagggagggagtgtgactgcgacgcccaatgtaagaagtatgacaagtgctgtcccgattatgagagtttctgtgcagaagtgcataatcccacatcaccaccatcttcaaagaaagcacctccaccttcaggagcatctcaaaccatcaaatcaacaaccaaacgttcacccaaaccaccaaacaagaagaagactaagaaagttatagaatcagaggaaataacagaagaacattctgtttctgaaaatcaagagtcctcctcctcctcctcctcttcctcttcttcttcaacaatttggaaaatcaagtcttccaaaaattcagctgctaatagagaattacagaagaaactcaaagtaaaagataacaagaagaacagaactaaaaagaaacctacccccaaaccaccagttgtagatgaagctggaagtggattggacaatggtgacttcaaggtcacaactcctgacacgtctaccacccaacacaataaagtcagcacatctcccaagatcacaacagcaaaaccaataaatcccagacccagtcttccacctaattctgatacatctaaagagacgtctttgacagtgaataaagagacaacagttgaaactaaagaaactactacaacaaataaacagacttcaactgatggaaaagagaagactacttccgctaaagagacacaaagtatagagaaaacatctgctaaagatttagcacccacatctaaagtgctggctaaacctacacccaaagctgaaactacaaccaaaggccctgctctcaccactcccaaggagcccacgcccaccactcccaaggagcctgcatctaccacacccaaagagcccacacctaccaccatcaagtctgcacccaccacccccaaggagcctgcacccaccaccaccaagtctgcacccaccactcccaaggagcctgcacccaccaccaccaaggagcctgcacccaccactcccaaggagcctgcacccaccaccaccaaggagcctgcacccaccaccaccaagtctgcacccaccactcccaaggagcctgcacccaccacccccaagaagcctgccccaactacccccaaggagcctgcacccaccactcccaaggagcctacacccaccactcccaaggagcctgcacccaccaccaaggagcctgcacccaccactcccaaagagcctgcacccactgcccccaagaagcctgccccaactacccccaaggagcctgcacccaccactcccaaggagcctgcacccaccaccaccaaggagccttcacccaccactcccaaggagcctgcacccaccaccaccaagtctgcacccaccactaccaaggagcctgcacccaccactaccaagtctgcacccaccactcccaaggagccttcacccaccaccaccaaggagcctgcacccaccactcccaaggagcctgcacccaccacccccaagaagcctgccccaactacccccaaggagcctgcacccaccactcccaaggaacctgcacccaccaccaccaagaagcctgcacccaccgctcccaaagagcctgccccaactacccccaaggagactgcacccaccacccccaagaagctcacgcccaccacccccgagaagctcgcacccaccacccctgagaagcccgcacccaccacccctgaggagctcgcacccaccacccctgaggagcccacacccaccacccctgaggagcctgctcccaccactcccaaggcagcggctcccaacacccctaaggagcctgctccaactacccctaaggagcctgctccaactacccctaaggagcctgctccaactacccctaaggagactgctccaactacccctaaagggactgctccaactaccctcaaggaacctgcacccactactcccaagaagcctgcccccaaggagcttgcacccaccaccaccaaggagcccacatccaccacctctgacaagcccgctccaactacccctaaggggactgctccaactacccctaaggagcctgctccaactacccctaaggagcctgctccaactacccctaaggggactgctccaactaccctcaaggaacctgcacccactactcccaagaagcctgcccccaaggagcttgcacccaccaccaccaaggggcccacatccaccacctctgacaagcctgctccaactacacctaaggagactgctccaactacccccaaggagcctgcacccactacccccaagaagcctgctccaactactcctgagacacctcctccaaccacttcagaggtctctactccaactaccaccaaggagcctaccactatccacaaaagccctgatgaatcaactcctgagctttctgcagaacccacaccaaaagctcttgaaaacagtcccaaggaacctggtgtacctacaactaagactcctgcagcgactaaacctgaaatgactacaacagctaaagacaagacaacagaaagagacttacgtactacacctgaaactacaactgctgcacctaagatgacaaaagagacagcaactacaacagaaaaaactaccgaatccaaaataacagctacaaccacacaagtaacatctaccacaactcaagataccacaccattcaaaattactactcttaaaacaactactcttgcacccaaagtaactacaacaaaaaagacaattactaccactgagattatgaacaaacctgaagaaacagctaaaccaaaagacagagctactaattctaaagcgacaactcctaaacctcaaaagccaaccaaagcacccaaaaaacccacttctaccaaaaagccaaaaacaatgcctagagtgagaaaaccaaagacgacaccaactccccgcaagatgacatcaacaatgccagaattgaaccctacctcaagaatagcagaagccatgctccaaaccaccaccagacctaaccaaactccaaactccaaactagttgaagtaaatccaaagagtgaagatgcaggtggtgctgaaggagaaacacctcatatgcttctcaggccccatgtgttcatgcctgaagttactcccgacatggattacttaccgagagtacccaatcaaggcattatcatcaatcccatgctttccgatgagaccaatatatgcaatggtaagccagtagatggactgactactttgcgcaatgggacattagttgcattccgaggtcattatttctggatgctaagtccattcagtccaccatctccagctcgcagaattactgaagtttggggtattccttcccccattgatactgtttttactaggtgcaactgtgaaggaaaaactttcttctttaaggattctcagtactggcgttttaccaatgatataaaagatgcagggtaccccaaaccaattttcaaaggatttggaggactaactggacaaatagtggcagcgctttcaacagctaaatataagaactggcctgaatctgtgtattttttcaagagaggtggcagcattcagcagtatatttataaacaggaacctgtacagaagtgccctggaagaaggcctgctctaaattatccagtgtatggagaaacgacacaggttaggagacgtcgctttgaacgtgctataggaccttctcaaacacacaccatcagaattcaatattcacctgccagactggcttatcaagacaaaggtgtccttcataatgaagttaaagtgagtatactgtggagaggacttccaaatgtggttacctcagctatatcactgcccaacatcagaaaacctgacggctatgattactatgcattttctaaagatcaatactataacattgatgtgcctagtagaacagcaagagcaattactactcgttctgggcagaccttatccaaagtctggtacaactgtccttagactgatgagcaaaggaggagtcaactaatgaagaaatgaataataaattttgacactgaaaaacattttattaataaagaatattgacatgagtataccagtttatatataaaaatgtttttaaacttgacaatcattacactaaaacagatttgataatcttattcacagttgttattgtttacagaccatttaattaatatttcctctgtttattcctcctctccctcccattgcatggctcacacctctctgtctgttaaactgacgaccacggaccctcgtgccgaattcttgcctcgagggccaaattccctatagtgagtccata

SEQ ID NO: 304 - DNA, 3129 bp, Homo sapiens
  misc_feature: Incyte ID No: 2135776CB1
ggaaaggcgagaaagaagctgtctccatcttgtctgtatccgctgctcttgtgacgttgtggagatggggagcgtcctggggctgtgctccatggcgagctggataccatgtttgtgtggaagtgccccgtgtttgctatgccgatgctgtcctagtggaaacaactccactgtaactagattgatctatgcacttttcttgcttgttggagtatgtgtagcttgtgtaatgttgataccaggaatggaagaacaactgaataagattcctggattttgtgagaatgagaaaggtgttgtcccttgtaacattttggttggctataaagctgtatatcgtttgtgctttggtttggctatgttctatcttcttctctctttactaatgatcaaagtgaagagtagcagtgatcctagagctgcagtgcacaatggattttggttctttaaatttgctgcagcaattgcaattattattggggcattcttcattccagaaggaacttttacaactgtgtggttttatgtaggcatggcaggtgccttttgtttcatcctcatacaactagtcttacttattgattttgcacattcatggaatgaatcgtgggttgaaaaaatggaagaagggaactcgagatgttggtatgcagccttgttatcagctacagctctgaattatctgctgtctttagttgctatcgtcctgttctttgtctactacactcatccagccagttgttcagaaaacaaggcgttcatcagtgtcaacatgctcctctgcgttggtgcttctgtaatgtctatactgccaaaaatccaagaatcacaaccaagatctggtttgttacagtcttcagtaattacagtctacacaatgtatttgacatggtcagctatgaccaatgaaccagaaacaaattgcaacccaagtctactaagcataattggctacaatacaacaagcactgtcccaaaggaagggcagtcagtccagtggtggcatgctcaaggaattataggactaattctctttttgttgtgtgtattttattccagcatccgtacttcaaacaatagtcaggttaataaactgactctaacaagtgatgaatctacattaatagaagatggtggagctagaagtgatggatcactggaggatggggacgatgttcaccgagctgtagataatgaaagggatggtgtcacttacagttattccttctttcacttcatgcttttcctggcttcactttatatcatgatgacccttaccaactggtacaggtatgaaccctctcgtgagatgaaaagtcagtggacagctgtctgggtgaaaatctcttccagttggattggcatcgtgctgtatgtttggacactcgtggcaccacttgttcttacaaatcgtgattttgactgagtgagacttctagcatgaaagtcccactttgattattgcttatttgaaaacagtattcccaacttttgtaaagttgtgtatgtttttgcttcccatgtaacttctccagtgttctggcatgaattagattttactgcttgtcattttgttattttcttaccaagtgcattgatatgtgaagtagaatgaattgcagaggaaagttttatgaatatggtgatgagttagtaaaagtggccattattgggcttattctctgctctatagttgtgaaatgaagagtgaaaacaaatttgtttgactattttaaaattatattagaccttaagctgttttagcaagcattaaagcaaatgtatggctgccttttgaaatatttgatgtgttgcctggcaggatactgcaaagaacatggtttattttaaaatttataaacaagtcacttaaatgccagttgtctgaaaaatcttataaggttttacccttgatacggaatttacacaggtagggagtgtttagtggacaatagtgtaggttatggatggaggtgtcggtactaaattgaataacgagtaaataatcttacttgggtagagatggcctttgccaacaaagtgaactgttttggttgttttaaactcatgaagtatgggttcagtggaaatgtttggaactctgaaggatttagacaaggttttgaaaaggataatcatgggttagaaggaagtgtttgaaagtcactttgaaagttagttttgggccagcacggtagctcacccttgtaatcccagcactttgggaggctgaggtgggtagattacttgagcccaggaattcaagaccagcctgggcaacatggtgaaaccctgtttctataaaaaataatctgggctttgtagcatatgcctgtggtcccagctactgaggaggctgaggtgggaggattgcttgagcccaggaggcagaggttgcagtgagccaaggtcacgtcactgcactctagcctgggcaacagagtaagacaaaaaaatatatatatattgaaaatcaaaggaggcaaaattttgacagggaaggaagtaactgcaaaacactaggctttagtaggtacttatataaaatctagtccagttctctcatttaaaaaaatgaagacactgaagtacagacttaaatagctcagatagctaattaggaaatttcaagttggccaataatagcattctctctgacatttaaaaataatttctattcaaaatacatgcataattgattttacacctcattactggtggataatttatgtgatgtggattgctggtgtccagcatgacccataaacaggtcagaagaatgatggaatgttttagaataaactcctgcttatagtatactacacagttcaaaagatgtttaaaatgcttttgtatttactgccatgtaattgaaatatatagattattgtaacctttcaacctgaaaatcaagcagtatgagagtttagttatttgtatgtgtcactagtgtctaatgaagcttttaaaatctacaatttcttctttaaaaatatttattaatgtgaatggaatataacaattcagcttaattccccaaccttattctgtgtgtagacattgtattccacaattttgaatggctgtgttttacctctaaataaatgaattcagagaaaaaaaaaaaaa

SEQ ID NO: 305 - DNA, 331 bp, Homo sapiens
  misc_feature: Incyte ID No: 241291.54
catggttatttttatcgttgggatctttctgtcttctgggttccattttttaaatgtttaaaaatatgttgacatggtagttcagttcttaaccaatgacttggggatgcaaacaattactgtcgttgggatttagagtgtattagtcacgcatgtatggggaagtagtctcgggtatgctgttgtgaaattgaaactgtaaaagtagatggttgaaagtactggtatgttgctctgtatggtaagaactaattctgttacgtcatgtacataattactaatcacttttcttcccctttacagcacaaataaagtttgagtttagaactca

SEQ ID NO: 306 - DNA, 1533 bp, Homo sapiens
  misc_feature: Incyte ID No: 406108.1
tcaacttggagcctgccattcagcgttgaggtagatgagttccgacactgtcacggctgtgttcccagcagcgaaggcctctgcggagctgccagtcgtcttgaacgtgcatgggcggcgtgtgacatctccagggaggccgtccgaagtcgagaatcgtcagctgtaagtaggagctacacagcgcagagaaaatggaaccacccatccgtgaggcctctttccggagggagccgcacacttggacttgagagtttgccagcagcgagctcggatgcatctctccaaaagccaccaaggtcggcgcgtctgaagagcgttttgcggtcatcagacttcctcatctgaaaacacagaacatactgaccctttcaagtacttagtcattttcctgaaagtgtggtctgtttcagaatgctgtggcaaccaggtaggtgtggcactggccatgtgccacgtctttgccctttgtagtctgtcagatattaaagtttctaaccctgtttttttaatctccaagaatggggaaagtggaatgtagagatggaagcagaacgtgatgtttggatacaacagctatttaatccttttttattttttaagcaaaacactcagttttctaccttattttctaatgttgatttcatggtaatactgacagttggaagtgtttaacataaaaactcattgctaaagagcactgaggaaatgggagctagcgcacttgtaataaaaataaagacaaaatattttcttgaatgcatatatgtgattgggtattttaaaaaccagtatcatctgtcatctccaaaagattataggagtcagcttgttaatacagtagtgttagtaggttctgtatttttaattcagtacttagaattctaggtcctttattgcccaaagtcagcacagttagtttataccacagactctgtcttggggcacagtagtggggcggggtagtgactttgcctaaacatcacccagctggaacagaggctgagcggggctttaggcacttgccagatgggaactgggttgcaccctccttgctccctgtcattttcttgtcactcttcctgcttcccagtgttttattttatgccttgctcgttgtacatcatgatgactgatggtcttcaaggttgtgaggaaagccgtctccctgcttgactcgactgctgtcccagaggagagtcctgtgcgacctgagcgggggtggctgccatttccagcatgcaggtgacttccaaagaatgagtcaggtggcactgaaagccatgggttctgaagaggcgaatttgttgaaaagtcccaagggtctgaatgaaagcatctttaatcaacactcaacactcgcaatattctagaaaaccatatactgtgctggttgaggccaaaggttaacattgctccactgttcaccaaggaagggggcagtggccatccgccgcggcctcacgtgcgttgtaacaagccctcatcacatgtgtgagtcttacgtgcacaaaaagagaaggcttgggtact

SEQ ID NO: 307 - DNA, 3705 bp, Homo sapiens
  misc_feature: Incyte ID No: 336256.10
gaaccagaccccagttcgccgactaagcagaagaaagatcaaaaaccggaaaagaggagaagagcaaacaggcactttgaggaacaatcccctttaactccaagccgacagcggtctaggaattcaagttcagtgcctaccgaagacaaaggcgccccgagggagtggcggtgcgaccccagggcgtgggcccggccgcggagcccacactgcccggctgacccggtggtctcggaccatgtctcccgccccaagaccctcccgttgtctcctgctccccctgctcacgctcggcaccgcgctcgcctccctcggctcggcccaaagcagcagcttcagccccgaagcctggctacagcaatatggctacctgcctcccggggacctacgtacccacacacagcgctcaccccagtcactctcagcggccatcgctgccatgcagaagttttacggcttgcaagtaacaggcaaagctgatgcagacaccatgaaggccatgaggcgcccccgatgtggtgttccagacaagtttggggctgagatcaaggccaatgttcgaaggaagcgctacgccatccagggtctcaaatggcaacataatgaaatcactttctgcatccagaattacacccccaaggtgggcgagtatgccacatacgaggccattcgcaaggcgttccgcgtgtgggagagtgccacaccactgcgcttccgcgaggtgccctatgcctacatccgtgagggccatgagaagcaggccgacatcatgatcttctttgccgagggcttccatggcgacagcacgcccttcgatggtgagggcggcttcctggcccatgcctacttcccaggccccaacattggaggagacacccactttgactctgccgagccttggactgtcaggaatgaggatctgaatggaaatgacatcttcctggtggctgtgcacgagctgggccatgccctggggctcgagcattccagtgacccctcggccatcatggcacccttttaccagtggatggacacggagaattttgtgctgcccgatgatgaccgccggggcatccagcaactttatgggggcgagtcagggttccccaccaagatgccccctcaacccaggactacctcccggccttctgttcctgataaacccaaaaaccccacctatgggcccaacatctgtgacgggaactttgacaccgtggccatgctccgaggggagatgtttgtcttcaaggagcgctggttctggcgggtgaggaataaccaagtgatggatggatacccaatgcccattggccagttctggcggggcctgcctgcgtccatcaacactgcctacgagaggaaggatggcaaattcgtcttcttcaaaggacacaagcattgggtgtttgatgaggcgtccctggaacctggctaccccaagcacattaaggagctgggccgagggctgcctaccgacaagattgatgctgctctcttctggatgcccaatggaaagacctacttcttccgtggaaacaagtactaccgtttcaacgaagagctcagggcagtggatagcgagtaccccaagaacatcaaagtctgggaagggatccctgagtctcccagagggtcattcatgggcagcgatgaagtcttcacttacttctacaaggggaacaaatactggaaattcaacaaccagaagctgaaggtagaaccgggctaccccaagtcagccctgagggactggatgggctgcccatcgggaggccggccggatgaggggactgaggaggagacggaggtgatcatcattgaggtggacgaggagggcggcggggcggtgagcgcggctgccgtggtgctgcccgtgctgctgctgctcctggtgctggcggtgggccttgcagtcttcttcttcagacgccatgggacccccaggcgactgctctactgccagcgttccctgctggacaaggtctgacgcccaccgccggcccgcccactcctaccacaaggactttgcctctgaaggccagtggcagcaggtggtggtgggtgggctgctcccatcgtcccgagccccctccccgcagcctccttgcttctctctgtcccctggctggcctccttcaccctgaccgcctccctccctcctgccccggcattgcatcttccctagataggtcccctgagggctgagtgggagggcggccctttccagcctctgcccctcaggggaaccctgtagctttgtgtctgtccagccccatctgaatgtgttgggggctctgcacttgaaggcaggaccctcagacctcgctggtaaaggtcaaatggggtcatctgctccttttccatcccctgacataccttaacctctgaactctgacctcaggaggctctgggcactccagccctgaaagccccaggtgtacccaattggcagcctctcactactctttctggctaaaaggaatctaatcttgttgagggtagagaccctgagacagtgtgagggggtggggactgccaagccaccctaagaccttgggaggaaaactcagagagggtcttcgttgctcagtcagtcaagttcctcggagatctgcctctgcctcacctaccccagggaacttccaaggaaggagcctgagccactggggactaagtgggcagaagaaacccttggcagccctgtgcctctcgaatgttagccttggatggggctttcacagttagaagagctgaaaccaggggtgcagctgtcaggtagggtggggccggtgggagaggcccgggtcagagccctgggggtgagcctgaaggccacagagaaagaaccttgcccaaactcaggcagctggggctgaggcccaaaggcagaacagccagagggggcaggaggggaccaaaaaggaaaatgaggacgtgcagcagcattggaaggctggggccgggcaggccaggccaagccaagcagggggccacagggtgggctgtggagctctcaggaagggccctgaggaaggcacacttgctcctgttggtccctgtccttgctgcccaggcagcgtggaggggaagggtagggcagccagagaaaggagcagagaaggcacacaaacgaggaatgaggggcttcacgagaggccacagggcctggctggccacgctgtcccggcctgctcaccatctcagtgaggggcaggagctggggctcgcttaggctgggtccacgcttccctggtgccagcacccctcaagcctgtctcaccagtggcctgccctctcgctcccccacccagcccacccattgaagtctccttgggccaccaaaggtggtggccatggtaccggggacttgggagagtgagacccagtggagggagcaagaggagagggatgtcgggggggtggggcacggggtaggggaaatggggtgaacggtgctggcagttcggctagatttctgtcttgtttgtttttttgttttgtttaatgtatatttttattataattattatatatgaattccattcaaatcgttcctttttgttaacaaggggcatggggaggggtgggggtgggggggcagaggcgtctgaccccaggaacctgcagggcggggctgggtcggtgccctctaaggacaattttgaccttgttcaacctttccacaaagaataaattgtgtttcac

SEQ ID NO: 308 - DNA, 3000 bp, Homo sapiens
  misc_feature: Incyte ID No: 1601717CB1
cggttaccggcccctcgctcgctgctcgccagcccagactcggccctggcagtggcggctggcgattcggaccgatccgacctgggcggaggtggcccgcgccccgcggcatgagccggtgaccaagctcggggccgagcgggaggcagccgtggccgaggagtgtgaggaagaggctgtctgtgtcattatgtgtgcgtcggtcaagtataatatccggggtcctgccctcatcccaagaatgaagaccaagcaccgaatctactatatcaccctcttctccattgtcctcctgggcctcattgccactggcatgtttcagttttggccccattctatcgagtcctcaaatgactggaatgtagagaagcgcacgatccgtgatgtgccggttgttaggctgccagccgacagtcccatcccagagcggggggatctcagttgcagaatgcacacgtgttttgatgtctatcgctgtggcttcaacccaaagaacaaaatcaaggtgtatatctatgctctgaaaaagtacgtggatgactttggcgtctctgtcagcaacaccatctcccgggagtataatgaactgctcatggccatctcagacagtgactactacactgatgacatcaaccgggcctgtctgtttgttccctccatcgatgtgcttaaccagaacacactgcgcatcaaggagacagcacaagcgatggcccagctctctaggtgggatcgaggtacgaatcacctgttgttcaacatgttgcctggaggtcccccagattataacacagccctggatgtccccagagacagggccctgttggctggtggcggcttttctacgtggacttaccggcaaggctacgatgtcagcattcctgtctatagtccactgtcagctgaggtggatcttccagagaaaggaccaggtccacggcaatacttcctcctgtcatctcaggtgggtctccatcctgagtacagagaggacctagaagccctccaggtcaaacatggagagtcagtgttagtactcgataaatgcaccaacctctcagagggtgtcctttctgtccgtaagcgctgccacaagcaccaggtcttcgattacccacaggtgctacaggaggctactttctgtgtggttcttcgtggagctcggctgggccaggcagtattgagcgatgtgttacaagctggctgtgtcccggttgtcattgcagactcctatattttgcctttctctgaagttcttgactggaagagagcatctgtggttgtaccagaagaaaagatgtcagatgtgtacagtattttgcagagcatcccccaaagacagattgaagaaatgcagagacaggcccggtggttctgggaagcgtacttccagtcaattaaagccattgccctggccaccctgcagattatcaatgaccggatctatccatatgctgccatctcctatgaagaatggaatgaccctcctgctgtgaagtggggcagcgtgagcaatccactcttcctcccgctgatcccaccacagtctcaagggttcaccgccatagtcctcacctacgaccgagtagagagcctcttccgggtcatcactgaagtgtccaaggtgcccagtctatccaaactacttgtcgtctggaataatcagaataaaaaccctccagaagattctctctggcccaaaatccgggttccattaaaagttgtgaggactgctgaaaacaagttaagtaaccgtttcttcccttatgatgaaatcgagacagaagctgttctggccattgatgatgatatcattatgctgacctctgacgagctgcaatttggttatgaggtctggcgggaatttcctgaccggttggtgggttacccgggtcgtctgcatctctgggaccatgagatgaataagtggaagtatgagtctgagtggacgaatgaagtgtccatggtgctcactggggcagctttttatcacaagtattttaattacctgtatacctacaaaatgcctggggatatcaagaactgggtagatgctcatatgaactgtgaagatattgccatgaacttcctggtggccaacgtcacgggaaaagcagttatcaaggtaaccccacgaaagaaattcaagtgtcctgagtgcacagccatagatgggctttcactagaccaaacacacatggtggagaggtcagagtgcatcaacaagtttgcttcagtcttcgggaccatgcctctcaaggtggtggaacaccgagctgaccctgtcctgtacaaagatgactttcctgagaagctgaagagcttccccaacattggcagcttatgaaacgtgtcattggtggaggtctgaatgtgaggctgggacagagggagagaacaaggcctcccagcactctgatgtcagagtagtaggttaagggtggaaggttgacctacttggatcttggcatgcacccacctaacccactttctcaagaacaagaacctagaatgaatatccaagcacctcgagctatgcaacctctgttcttgtatttcttatgatctctgatgggttcttctcgaaaatgccaagtggaagactttgtggcatgctccagatttaaatccagctgaggctccctttgttttcagttccatgtaacaatctggaaggaaacttcacggacaggaagactgctggagaagagaagcgtgttagcccatttgaggtctggggaatcatgtaaagggtacccagacctcacttttagttatttacatcaatgagttctttcagggaaccaaacccagaattcggtgcaaaagccaaacatcttggtgggatttgataaatgccttgggacctggagtgctgggcttgtgcacaggaagagcaccagccgctgagtcaggatcctgtcagttccatgagctattcctctttggtttggctttttgatatgattaaaattattttttattccttttaaaaaaaaa

SEQ ID NO: 309 - DNA, 2724 bp, Homo sapiens
  misc_feature: Incyte ID No: 300437.18
  unsure 2060: a, t, c, g, or other
gaattccgggggttccggcgctccgcggccccaagcgccctcctttcctccctccgccggccggggttgcgggcgcggggcgccgcgggccatgcgatctcggcgcggcccagcccggccggcggcgccccgcccccgctggagccctgggggccccgctgcggccgaggccatgttcccggtgtttccttgcacgctgctggccccccccttccccgtgctgggcctggactcccggggggtgggcggcctcatgaactccttcccgccacctcagggtcacgcccagaaccccctgcaggtcggggctgagctccagtcccgcttctttgcctcccagggctgcgcccagagtccattccaggccgcgccggcgcccccgcccacgccccaggccccggcggccgagcccctccaggtggacttgctcccggtgctcgccgccgcccaggagtccgccgcggctgctgcggcctgctgccgccgctgctgccgccgtcgctgccgcgcccccggcccctgccgccgcctctacggtggacacagcggccctgaagcagcctccggcgccccctccgccacccccgccagtgtcggcgcccgcggccgaggccgcgccccccgcctccgccgccactatcgccgcggcggcggccaccgccgtcgtagccccaacctcgacggtcgccgtggccccggtcgcgtctgccttggagaagaagacaaagagcaaggggccctacatctgcgctctgtgcgccaaggagttcaagaacggctacaatctccggaggcacgaagccatccacacgggagccaaggccggccgggtcccctcgggtgctatgaagatgccgaccatggtgcccctgagcctcctgagcgtgccccagctgagcggagccggcgggggagggggagaggcgggtgccggcggcggcgctgccgcagtggccgccggtggcgtggtgaccacgaccgcctcgggggaagcgcatccggaagaaccatgcctgcgagatgtgtggcaaggccttccgcgacgtctaccacctgaaccgacacaagctgtcgcactcggacgagaagccctaccagtgcccggtgtgccagcagcgcttcaagcgcaaggaccgcatgagctaccacgtgcgctcacatgacggcgctgtgcacaagccctacaactgctcccactgtggcaagagcttctcccggccggatcacctcaacagtcacgtcagacaagtgcactcaacagaacggcccttcaaatgtgagaaatgtgaggcagctttcgccacgaaggatcggctgcgggcgcacacagtacgacacgaggagaaagtgccatgtcacgtgtgtggcaagatgctgagctcggcttatatttcggaccacatgaaggtgcacagccagggtcctcaccatgtctgtgagctctgcaacaaaggtactggtgaggtttgtccaatggcggcggcagcggcggcggcagcggcagcagcggcagcggcagcagcggcagcagtagcagcccctcccacagctgtgggctccctctcgggggcggagggggtgcctgtgagctctcagccacttccctcccaaccctggtgagctccaagttggttgcgggggagaggggagaatggagtagagtcccttggtacaagctcctctcccccctcttttcccaccaactcctatttccctaccaaccaaggagcctccagaaggaaaggaggaagaaatgttttcttaggggaattcgctaggttttaacgatttgtttctcctgctcctcttctatcagacctgaccccacacaaacctgtcccctcggttgtgttgaagtcccctggacagtgggcaggggtggcagaggacacgagcagccactgcccgtaccccctctcctctctgtaagcccatgccctgtcttcccagggacttgtgagcctcttccctcgacggtcctcttctctccttccagtcctctccccctgctgtctgcagcccctccccggggagttggtgctttcttttcctttttttantttttccagggggagggaggagaggaaggagggggatcagagctgtcccaaagagggaaagcggtgaggtttgaggaggggcagaagcagggccggcaaaggttgtaccttcataaggtggtatggggggttggggtcaggccctgaacatcgtcctacttgagaatctgtcaggggaaaaagtcaaggggagcaggaggaagagccaggagggccagaggcagagaagagatggagtcttaggggccagggtgagcgaggggtccagggcctagaggtgcttcctgggggcgggggaatgcagccagtgtccccctcccctcttccaccccagctccagccctggtcttgtcttttcatccctcttccccacgacagaagaagttgtggccctggccatgtcatcgtgttcctgtgtcccctgcatgtaccccaccctccaccccttccttttgcgcggaccccattacaataaattttaaataaaatcctgtttctggctctggattgaatgaattgccctcactaagaactgccgacaaccccaagggtttcttctcggcctggtgtccgtcaatccagccttgctctgccctgtgaggctgtgaggttctggctccgtcctccccaggggcagccttactggcggcagcacagatacagg

SEQ ID NO: 310 - DNA, 1560 bp, Homo sapiens
  misc_feature: Incyte ID No: 013705CB1
agatggcggcgctgagggctttgtgcggcttccggggcgtcgcggcccaggtgctgcggcctggggctggagtccgattgccgattcagcccagcagaggtgttcggcagtggcagccagatgtggaatgggcacagcagtttgggggagctgttatgtacccaagcaaagaaacagcccactggaagcctccaccttggaatgatgtggaccctccaaaggacacaattgtgaagaacattaccctgaactttgggccccaacacccagcagcgcatggtgtcctgcgactagtgatggaattgagtggggagatggtgcggaagtgtgatcctcacatcgggctcctgcaccgaggcactgagaagctcattgaatacaagacctatcttcaggcccttccatactttgaccggctagactatgtgtccatgatgtgtaacgaacaggcctattctctagctgtggagaagttgctaaacatccggcctcctcctcgggcacagtggatccgagtgctgtttggagaaatcacacgtttgttgaaccacatcatggctgtgaccacacatgccctggaccttggggccatgacccctttcttctggctgtttgaagaaagggagaagatgtttgagttctacgagcgagtgtctggagcccgaatgcatgctgcttatatccggccaggaggagtgcaccaggacctaccccttgggcttatggatgacatttatcagttttctaagaacttctctcttcggcttgatgagttggaggagttgctgaccaacaataggatctggcgaaatcggacaattgacattggggttgtaacagcagaagaagcacttaactatggttttagtggagtgatgcttcggggctcaggcatccagtgggacctgcggaagacccagccctatgatgtttacgaccaggttgagtttgatgttcctgttggttctcgaggggactgctatgataggtacctgtgccgggtggaggagatgcgccagtccctgagaattatcgcacagtgtctaaacaagatgcctcctggggagatcaaggttgatgatgccaaagtgtctccacctaagcgagcagagatgaagacttccatggagtcactgattcatcactttaagttgtatactgagggctaccaagttcctccaggagccacatatactgccattgaggctcccaagggagagtttggggtgtacctggtgtctgatggcagcagccgcccttatcgatgcaagatcaaggctcctggttttgcccatctggctggtttggacaagatgtctaagggacacatgttggcagatgtcgttgccatcataggtacccaagatattgtatttggagaagtagatcggtgagcaggggagcagcgtttgatcccccctgcctatcagcttcttctgtggagcctgttcctcactggaaattggcctctgtgtgtgtgtgtgtgtgtgtgtgtgtgtgtgtgtgtatgttcatgtacacttggctgtcaggctttctgtgcatgtactaaaaaaaaaa

SEQ ID NO: 311 - DNA, 1237 bp, Homo sapiens
  misc_feature: Incyte ID No: 995450.6
gcggcgctgagggctttgtgcggcttccggggcgtcgcggcccaggtgctgcggcctggggctggagtccgattgccgattcagcccagcagatgtggaccctccaaaggacacaattgtgaagaacattaccctgaactttgggccccaacacccagcagcgcatggtgtcctgcgactagtgatggaattgagtggggagatggtgcggaagtgtgatcctcacatcgggctcctgcaccgaggcactgagaagctcattgaatacaagacctatcttcaggcccttccatactttgaccggctagactatgtgtccatgatgtgtaacgaacaggcctattctctagctgtggagaagttgctaaacatccggcctcctcctcgggcacagtggatccgagtgctgtttggagaaatcacacgtttgttgaaccacatcatggctgtgaccacacatgccctggaccttggggccatgacccctttcttctggctgtttgaagaaagggagaagatgtttgagttctacgagcgagtgtctggagcccgaatgcatgctgcttatatccggccaggaggagtgcaccaggacctaccccttgggcttatggatgacatttatcagttttctaagaacttctctcttcggcttgatgagttggaggagttgctgaccaacaataggatctggcgaaatcggacaattgacattggggttgtaacagcagaagaagcacttaactatggttttaggtgaggggaatacaacttctctccgtaggagtgggggtgggagtgggggagttccagcctaatatcttgtctttgaagacttgttggcatcctcctagtcataccctgaatgtgaaggatcaacaagggaggctaaggaagaaggagcctccttacttagtttgtggagagtggcccttattcccattatgctctccacagtggagtgatgcttcggggctcaggcatccagtgggacctgcggaagacccagccctatgatgtttacgaccaggttgagtttgatgttcctgttggttctcgaggggactgctatgataggtaaggccccaatcctttcttggctgatattccagctagtttcccctgcctcactcttctctttgccacttccttctttaccctacttctcagtgtctgtgggagctcttgtgtgtgttagacgaggttgctctcaaaacactttcacatatatggaatc

SEQ ID NO: 312 - DNA, 2632 bp, Homo sapiens
  misc_feature: Incyte ID No: 1327112.34
ggcgcccggacgcctctttgaccagcgcttcggcgaggggctgctggaggccgagctggctgcgctctgccccaccacgctcgccccctactacctgcgcgcacccagcgtggcgctgcccgtcgcccaggtgccaggcctggggaggggtgaactcgaccacttccattgccaggggtctggggcagcctggggtgggaacatgatgagcacggattcgtcgcgcgcgagttccaccgtcgctaccgcctgccgcctggcgtggatccggctgccgtgacgtccgcgctgtcccccgagggcgtcctgtccatccaggccgcgcccgcaccccgggagcctcctcaggctccctctattaaagccgatctgactccgcccagccagatgtcccgagtgcgccaaggactgtcctctcacccactcctggattctgccctgacctccatcctggacactgccttgataacatagacccttccactgacaccctcgctctcacaccccctccagctttccgaccccacaccgacaactccccggcttccaggccgcaccagcactaccctaaccctcagccgacagtctcagccccaccgacccactttcttggcatatagccccacttaagacccctcctctacttccttctgagtcctctacaaagacatccgggtactacatttccatcccttccctattttgacaccaaattatggtgtagacagccctcccccaaccccaggccagtcaggcacaatccccccaccccccaaacgtcctggactgcacagacctcccactccagaccatccaggcctggttcccaagacccgatccttcccctgcaaccagacagtctacaactgccccctccagcccattttctgccgtgaaaccccagccagccacaccagactctggaaccctttttcgactgccccaactcttggacaccaggccaactagaacacccaacaccaaactgtacagactctccactctcccaccccaacctccccagactctgcacggatgtcctaggccccctccccaactctaaccagaccccatccccctaagtccctttgtcttgacccccaagtcttcaaccagatatcctcggcaacccacctcccaccctcctcctcttctccttcaagacccaactgagcacccgctctgattccccacagcctttctccctgccaccactcccttagtctttcccaggcttactctcccaataaatgtgctagagctctgcctgaacagtgtggcccgccatgttcttctccgcggcgctccgggcccgggcggctggcctcaccgcccactggggaagacatgtaaggaatttgcataagacagttatgcaaaatggagctggaggagctttatttgtgcacagagatactcctgagaataaccctgatactccatttgatttcacaccagaaaactataagaggatagaggcaattgtaaaaaactatccagaaggccataaagcagcagctgttcttccagtcctggatttagcccaaaggcagaatgggtggttgcccatctctgctatgaacaaggttgcagaagttttacaagtacctccaatgagagtatatgaagtagcaactttttatacaatgtataatcgaaagccagttggaaagtatcacattcaggtctgcactactacaccctgcatgcttcgaaactctgacagcatactggaggccattcagaaaaagcttggaataaaggttggggagactacacctgacaaacttttcactcttatagaagtggaatgtttaggggcctgtgtgaacgcaccaatggttcaaataaatgacaattactatgaggatttgacagctaaggatattgaagaaattattgatgagctcaaggctggcaaaatcccaaaaccagggccaaggagtggacgcttctcttgtgagccagctggaggtcttacctctttgactgaaccacccaagggacctggatttggtgtacaagcaggcctttaatttatattgaactgtaaatatgtcactagagaaataaaatatggacttccaatctaaaaagaagagtagaggagaagggcggccgccggctgttgagcgacgtgcgagccgggtgattaattcgcgggcgcgtgaccgtccggggcggagccggttgttgtccctgaggagttggggtgggtagtttaggcgggtttggggcggtaaattcggttgaggagcatgatgccgcggttgttcccggaggtggttggaggtagtgtgtgtgacatacggcgacgtactcacaggttgttgcaatgtatggagggcgattgagtaggtagtcgtgtgagaggtccgattaagtggtgtggtgtagaaggtctcttgtgggtggttggcccgaagattggaggttagggatgttagtgtgtgagttcgtgttgatagatggcaggtctctgatgtgtcatgtgggtcacggtagtgtacgaagttgagggtagaagcagtagcggtgggacgatgtggtcggtgtatgcgtagtggcgggtcgaagctcgtgtaggtgtgtaggggtggtagttgttgctgcgatttgtgcgtgccacgtg

SEQ ID NO: 313 - DNA, 936 bp, Homo sapiens
  misc_feature: Incyte ID No: 2630652CB1
cgtttcgggtgctggcggctgcagccggagttcaaacctaagcagctggaagggccctgtggctaggtaccatagagtctctacacaggactaagtcagcctggtgtgcaggggaggcagacacacaaacagaaaattggactacagtgctaagatgctgtaagaagaggttaactaaaggacaggaagatggggccaagagatggtgctactgtctactttagggatcgtctttcaaggcgaggggcctcctatctcaagctgtgatacaggaaccatggccaactgtgagcgtaccttcattgcgatcaaaccagatggggtccagcggggtcttgtgggagagattatcaagcgttttgagcagaaaggattccgccttgttggtctgaaattcatgcaagcttccgaagatcttctcaaggaacactacgttgacctgaaggaccgtccattctttgccggcctggtgaaatacatgcactcagggccggtagttgccatggtctgggaggggctgaatgtggtgaagacgggccgagtcatgctcggggagaccaaccctgcagactccaagcctgggaccatccgtggagacttctgcatacaagttggcaggaacattatacatggcagtgattctgtggagagtgcagagaaggagatcggcttgtggtttcaccctgaggaactggtagattacacgagctgtgctcagaactggatctatgaatgacaggagggcagaccacattgcttttcacatccatttcccctccttcccatgggcagaggaccaggctgtaggaaatctagttatttacaggaacttcatcataatttggagggaagctcttggagctgtgagttctccctgtacagtgttaccatccccgaccatctgattaaaatgcttcctcccaaaaaaaaaaaaaa

SEQ ID NO: 314 - DNA, 1753 bp, Homo sapiens
  misc_feature: Incyte ID No: 410512.2
  unsure 511-583: a, t, c, g, or other
catcctccagggcctgccactccagctcgctccaggtcttggcttttctccagattagcacctggccagacttgactctcaccccagccactgagcagtctttcacactctctttttctccagaatttgaagatctagatgctgtgggttttcatcctactccacgtgggagttcactttgggcctatggattggaaaatccagcgtgacctcattttcagaattctgctgagttatttctaggtggttcttcagtccaggttctggatccctccatgcctcctgggagctgctcactatctcctggccaccctgctcttctctgcaggaattcccagagccacatcaggcagggctgggggaagaaaagggaggcattagagtacatggctctcagctcctcttggggactagcccaactgggttcagacacagaacagcctttcctccccctcttagtatctgctttgtcctatcaaaggaaggttggtgaaaaaccaaaatgaaacannnnnnnnnnnnnnnnnnnnnnnnnnnnnnnnnnnnnnnnnnnnnnnnnnnnnnnnnnnnnnnnnnnnnnnnnctcttcttattgtgtctttttccttgtaagacattaactaaaagttactggtagtaaatggtgactgttttacaattgggtttcattattgacaatatcaaaaaaaagcagcaatctttaagagttcaaattagtgtaagataggaaggactgcaaaacaatctgatttttcagttgtaattaaagtgctccttttcttattttaagtaaaataaaattaatcagtcactggcaacaatcattattaagaggtcttttagggcaaaatttaatagtatgaagaggtttacaaaaatagattgacgttattttgagaaatactgtaattttttctcaattcagttttgataaattgtacctaatcatagaaaaattattccaattcaaacttgacatatattaaaaaagtagagatgaaattaactcagctacgtaacagatctggcaaaatataagaatgaaaaaaattctacacagggcacttatttcatatccagaggtaaaaacattttctattagtagcttatcttcttcctgtaagcaatcacagattctaagttgatcatgcggtacaaagtcacagcagtcagaatcttctgtttgatgcaacacacaaagttgtttgtttccttactaaaatgcgaactggttgtctatttttctttatcccatttattcgtattcacaaattaacaaatagcgtcaacaattattgtaggtgaagtggggtattgctggatcaaaggctctataagacgtctttactgactgaatctgaaggtttattgagttcaatcctcacacctttttcacctgttagatattttactttagctcgtgctctctcatctgcatcaaataccaaacagttattgccgtactttgtagcatatgctggttgtacttcatgagggttgcgatggtcagaccagaaaaacagcagtctatcaaatttgggttcaatgtcagcaaactaggctttaccttctagaaaaattcgaagtatacctccacttaccttggcatcccgttctttaacgtaatgtaatacatttcacacgtcttccgtctccatttggattatcaacatgacgtacataacccgttccattgaccggataacaagcagccatggcttttgtccggcccggggacgcgcgaggcggggac

SEQ ID NO: 315 - DNA, 693 bp, Homo sapiens
  misc_feature: Incyte ID No: 241930.28
gggaaaaggcgcagtctcggtgggattgcgtgcaggagggtcgtggtctggctgtggcggaggagcataagaaggtgtcctgtcagaagaacagatccgcctgaagaaactgaagcggcaagaggaggaacaggctcatgccacatccttgccccccagggcttcctcacccccccaaatcctgccccagctcagcccggaacaactgggcatgatcgagaagctcgtcgctgcccagcaacagtgtaaccggcgctccttttctgaccggcttcgagtcacgccttggcccatggcaccagatccccatagccgggaggcccgtcagcagcgctttgcccacttcactgagctggccatcgtctctgtgcaggagatagttgactttgctaaacagctacccggcttcctgcagctcagccgggaggaccagattgccctgctgaagacctctgcgatcgaggtgatgcttctggagacatctcggaggtacaaccctgggagtgagagtatcaccttcctcaaggatttcagttataaccgggaagactttgccaaagcagggctgcaagtggaattcatcaaccccatcttcgagttctccagggccatgaatgagctgcaactcaatgatgccgagtttgccttgctcattgctatcagcatcttctctgcaggtgtggaggaggggcg

SEQ ID NO: 316 - DNA, 1679 bp, Homo sapiens
  misc_feature: Incyte ID No: 209356CB1
ctgggtcctgcttgtgctcagctccagctcactggctggccaccgagacttctggacaggaaactgcaccatcctcttctcccagcaagggggctccagagactgcccacccaggaagtctggtggcctggggatttggacagtgccttggtaatgaccagggctccaggaagagatgtccttgtggctgggggcccctgtgcctgacattcctcctgactctgcggtggagctgtggaagccaggcgcacaggatgcaagcagccaggcccagggaggcagcagctgcatcctcagagaggaagccaggatgccccactctgctgggggtactgcaggggtggggctggaggctgcagagcccacagccctgctcaccagggcagagcccccttcagaacccacagagatccgtccacaaaagcggaaaaaggggccagcccccaaaatgctggggaacgagctatgcagcgtgtgtggggacaaggcctcgggcttccactacaatgttctgagctgcgagggctgcaagggattcttccgccgcagcgtcatcaagggagcgcactacatctgccacagtggcggccactgccccatggacacctacatgcgtcgcaagtgccaggagtgtcggcttcgcaaatgccgtcaggctggcatgcgggaggagtgtgtcctgtcagaagaacagatccgcctgaagaaactgaagcggcaagaggaggaacaggctcatgccacatccttgccccccagggcttcctcacccccccaaatcctgccccagctcagcccggaacaactgggcatgatcgagaagctcgtcgctgcccagcaacagtgtaaccggcgctccttttctgaccggcttcgagtcacgccttggcccatggcaccagatccccatagccgggaggcccgtcagcagcgctttgcccacttcactgagctggccatcgtctctgtgcaggagatagttgactttgctaaacagctacccggcttcctgcagctcagccgggaggaccagattgccctgctgaagacctctgcgatcgaggtgatgcttctggagacatctcggaggtacaaccctgggagtgagagtatcaccttcctcaaggatttcagttataaccgggaagactttgccaaagcagggctgcaagtggaattcatcaaccccatcttcgagttctccagggccatgaatgagctgcaactcaatgatgccgagtttgccttgctcattgctatcagcatcttctctgcagaccggcccaacgtgcaggaccagctccaggtagagaggctgcagcacacatatgtggaagccctgcatgcctacgtctccatccaccatccccatgaccgactgatgttcccacggatgctaatgaaactggtgagcctccggaccctgagcagcgtccactcagagcaagtgtttgcactgcgtctgcaggacaaaaagctcccaccgctgctctctgagatctgggatgtgcacgaatgactgttctgtccccatattttctgttttcttggccggatggctgaggcctggtggctgcctcctagaagtggaacagactgagaagggcaaacattcctgggagctgggcaaggagatcctcccgtggcattaaaagagagtcaaagggttaaaaaaaaaa

SEQ ID NO: 317 - DNA, 1295 bp, Homo sapiens
  misc_feature: Incyte ID No: 2887718CB1
attccgtcctgcgcggttgttctctggagcagcgttcttttatctccgtccgccttctctcctacctaagtgcgtgccgccacccgatggaagattcgatggacatggacatgagccccctgaggccccagaactatcttttcggttgtgaactaaaggccgacaaagattatcactttaaggtggataatgatgaaaatgagcaccagttatctttaagaacggtcagtttaggggctggtgcaaaggatgagttgcacattgttgaagcagaggcaatgaattacgaaggcagtccaattaaagtaacactggcaactttgaaaatgtctgtacagccaacggtttcccttgggggctttgaaataacaccaccagtggtcttaaggttgaagtgtggttcagggccagtgcatattagtggacagcacttagtagctgtggaggaagatgcagagtcagaagatgaagaggaggaggatgtgaaactcttaagtatatctggaaagcggtctgcccctggaggtggtagcaaggttccacagaaaaaagtaaaacttgctgctgatgaagatgatgacgatgatgatgaagaggatgatgatgaagatgatgatgatgatgattttgatgatgaggaagctgaagaaaaagcgccagtgaagaaatctatacgagatactccagccaaaaatgcacaaaagtcaaatcagaatggaaaagactcaaaaccatcatcaacaccaagatcaaaaggacaagaatccttcaagaaacaggaaaaaactcctaaaacaccaaaaggacctagttctgtagaagacattaaagcaaaaatgcaagcaagtatagaaaaaggtggttctcttcccaaagtggaagccaaattcatcaattatgtgaagaattgcttccggatgactgaccaagaggctattcaagatctctggcagtggaggaagtctctttaagaaaatagtttaaacaatttgttaaaaaattttccgtcttatttcatttctgtaacagttgatatctggctgtcctttttataatgcagagtgagaactttccctaccgtgtttgataaatgttgtccaggttctattgccaagaatgtgttgtccaaaatgcctgtttagtttttaaagatggaactccaccctttgcttggttttaagtatgtatggaatgttatgataggacatagtagtagcggtggtcagacatggaaatggtggggagacaaaaatatacatgtgaaataaaactcagtattttaataaagtaaaaaa

SEQ ID NO: 318 - DNA, 1152 bp, Homo sapiens
  misc_feature: Incyte ID No: 2057159CB1
ctcggctttcttctcgtcggtgttcccggctgctatagagccgggtgagagagcgagcgcccgtcggcgggtgtcgagggcgggttgcctcgcgctgacccttcccgccctccttctcgtcacacaccaggtccccgcggaagccgcggtgtcggcgccatggcggagctgacggctcttgagagtctcatcgagatgggcttccccaggggacgcgcggagaaggctctggccctcacagggaaccagggcatcgaggctgcgatggactggctgatggagcacgaagacgaccccgatgtggacgagcctttagagactccccttggacatatcctgggacgggagcccacttcctcagagcaaggcggccttgaaggatctggttctgctgccggagaaggcaaacccgctttgagtgaagaggaaagacaggaacaaactaagaggatgttggagctggtggcccagaagcagcgggagagtgaagaaagagaggaacgggaggcattggaacgggaacggcagcgcaggagacaagggcaagagttgtcagcagcacgacagcggctacaggaagatgagatgcgccgggctgctgaggagaggcggagggaaaaggccgaggagttagcagccagacaaagagttagagaaaagatcgagagggacaaagcagagagagccaagaagtatggtggcagtgtgggctctcagccacccccagtggcaccagagccaggtcctgttccctcttctcccagccaggagcctcccaccaagcgggagtatgaccagtgtcgcatacaggtcaggctgccagatgggacctcactgacccagacgttccgggcccgggaacagctggcagctgtgaggctctatgtggagctccaccgtggggaggaactaggtgggggccaggaccctgtgcaattgctcagtggcttccccagacgggccttctcagaagctgacatggagcggcctctgcaggagctgggactcgtgccttctgctgttctcattgtggccaagaaatgtcccagctgagggcctttgtcccattgtccctctgtgaccccttcatctttgataaagcactgacatctccttcctaataaatagaccctgagttctgtaaaaaaaaaa

SEQ ID NO: 319 - DNA, 2647 bp, Homo sapiens
  misc_feature: Incyte ID No: 373272.2
  unsure 2584, 2613, 2617: a, t, c, g, or other
ccctcgagggagaactggacgttgtgaacagagttagctggtaaatgtcctcttaaaagatccaaaaaatgagacttctagcaaagattatttgccttatgttatgggctatttgtgtagcagaagattgcaatgaacttcctccaagaagaaatacagaaattctgacaggttcctggtctgaccaaacatatccagaaggcacccaggctatctataaatgccgccctggatatagatctcttggaaatgtaataatggtatgcaggaagggagaatgggttgctcttaatccattaaggaaatgtcagaaaaggccctgtggacatcctggagatactccttttggtacttttacccttacaggaggaaatgtgtttgaatatggtgtaaaagctgtgtatacatgtaatgaggggtatcaattgctaggtgagattaattaccgtgaatgtgacacagatggatggaccaatgatattcctatatgtgaagttgtgaagtgtttaccagtgacagcaccagagaatggaaaaattgtcagtagtgcaatggaaccagatcgggaataccattttggacaagcagtacggtttgtatgtaactcaggctacaagattgaaggagatgaagaaatgcattgttcagacgatggtttttggagtaaagagaaaccaaagtgtgtggaaatttcatgcaaatccccagatgttataaatggatctcctatatctcagaagattatttataaggagaatgaacgatttcaatataaatgtaacatgggttatgaatacagtgaaagaggagatgctgtatgcactgaatctggatggcgtccgttgccttcatgtgaagaaaaatcatgtgataatccttatattccaaatggtgactactcacctttaaggattaaacacagaactggagatgaaatcacgtaccagtgtagaaatggtttttatcctgcaacccggggaaatacagcaaaatgcacaagtactggctggatacctgctccgagatgtaccttgaaaccttgtgattatccagacattaaacatggaggtctatatcatgagaatatgcgtagaccatactttccagtagctgtaggaaaatattactcctattactgtgatgaacattttgagactccgtcaggaagttactgggatcacattcattgcacacaagatggatggtcgccagcagtaccatgcctcagaaaatgttattttccttatttggaaaatggatataatcaaaattatggaagaaagtttgtacagggtaaatctatagacgttgcctgccatcctggctacgctcttccaaaagcgcagaccacagttacatgtatggagaatggctggtctcctactcccagatgcatccgtgtcagctttaccctctgaacttctgatcgaaggtcatccctctccagcttgagtggatcaaagatgacaagggccaatggaaccaagtttgagtcttgccaggtcaatacttgggtcctgagtatggtgactagtatctgttttgttatgtgtgtattattccagccagaatgggaaatgctaattcagctcctccaggcagcccaatggggctggtggctttgagattattaaactctttctctgctgcaaaccccactgtctcagtgtattgttctgttgctgtgcagcaggcatacaaatctgacaatctcgtaactatttgtggcaagccaggtcgaggtcactctctttgagggcatttactcactgcctagtgccccctttccactgggacagacccagagacaaaccctagcagcttacttagctctcatgaactaaggggctgtcccttagttctcccaaagtaacccacaatgcaaccctgatgggctgcatcttccaaaattgaaaggcctttgtctatcattccatgaaacaaaaaaagattatcttactttttaacatggcttaaccttaatacccactggatttcggagaacagtggccactgcatggttctcatgcttacagtacgatcctgtagctagatttgttttgtaagaaggaagaagaatgagatgaaataccctatgtataatgttttatgttgctttggaaaagtacaacaatgtagaaaaaggtaaaatcatgataaagtaagaaattaaaaactgtttggactgatttacaagaaaaagatgatgctatgatggttcagttaaaggaacctatgactcacccccctccactttatgggggagctgcagcagcactactggcgcctctccagagtccccaccaccaaaaagtcacaaatccggggcaacaggtatgatctctacttcttataacccaacaggggactccatttaggcagggtgtcacttcttatacccaacagggaactccatttagccggggagtcactctggttctgagaggcagtttccccataacaactgcttacaggaggtgttgctgccacaggccagcctataggatttatcttggtttattctctgttctccacttccaacctacttaattagaaaaataatatgcctatttattgagaaganctaaagtttatggaaggaacaggattganaaanaaaaaaaaaacatccaaagcgtatgaagaa

SEQ ID NO: 320 - DNA, 906 bp, Homo sapiens
  misc_feature: Incyte ID No: 001252CB1
cccaaacgcggtacagaccaaaccgcagtccacgttacggatcggcttactccgcggagttggcctcatttctgcagtcggcgctccctgtagtttctcctctcgaacgccaggtggagcaaccggccggataccgccacagccctggcaggcggcgctgtgatgcctgagctgatcctgtatgttgcaatcactctatccgtggctgagcgactcgttggcccgggtcacgcatgcgctgagccttcctttcgctcttcccgctgctccgcccctctctgtcttctctgcagtgggagcagctctcctgccacagctcctcaccccctgaaaatgttcgcctgctccaagtttgtctccactccctccttggtcaagagcacctcacagctgctgagccgtccgctatctgcagtggtgctgaaacgaccggagatactgacagatgagagcctcagcagcttggcagtctcatgtccccttacctcacttgtctctagccgcagcttccaaaccagcgccatttcaagggacatcgacacagcagccaagttcattggagctggggctgccacagttggggtggctggttctggggctgggattggaactgtgtttgggagcctcatcattggttatgccaggaacccttctctgaagcaacagctcttctcctacgccattctgggctttgccctctcggaggccatggggctcttttgtctgatggtagcctttctcatcctctttgccatgtgaaggagccgtctccacctcccatagttctcccgcgtctggttggccccgtgtgttccttttcctatacctccccaggcagcctggggaacgtggttggctcagggtttgacagagaaaagacaaataaatactgtattaataagggtg

SEQ ID NO: 321 - DNA, 210 bp, Homo sapiens
  misc_feature: Incyte ID No: 033177.1
cctgcccttcccaaagacctttgacaactagaaggagatgtaacaagttcccatatctgggatacagtaagattcttagagcctttgggcttcagattgtgccagaaagcaagaatttggtcaaggactcgtgagggcaagtctgaaagacaaaagcactactttcaaggaaatgtcactggtgatgtttggatagatttcagcatcaaa

SEQ ID NO: 322 - DNA, 1389 bp, Homo sapiens
  misc_feature: Incyte ID No: 1356660CB1
cacgccgacgacgcgcgaagggcacacatcttaggacccggaggacgtccggcctctgtgagccgcaacctttccaagggagtggttgtgtgatcgccatcttagggaaaagatgttctcgtccgtggcgcacctggcgcgggcgaaccccttcaacacgccacatctgcagctggtgcacgatggtctcggggacctccgcagcagctccccagggcccacgggccagccccgccgccctcgcaacctggcagccgccgccgtggaagagtacagttgtgaatttggctccgcgaagtattatgcactgtgtggctttggtggggtcttaagttgtggtctgacacacactgctgtggttcccctggatttagtgaaatgccgtatgcaggtggacccccaaaagtacaagggcatatttaacggattctcagttacacttaaagaggatggtgttcgtggtttggctaaaggatgggctccgactttccttggctactccatgcagggactctgcaagtttggcttttatgaagtctttaaagtcttgtatagcaatatgcttggagaggagaatacttatctctggcgcacatcactatatttggctgcctctgccagtgctgaattctttgctgacattgccctggctcctatggaagctgctaaggttcgaattcaaacccagccaggttatgccaacactttgagggatgcagctcccaaaatgtataaggaagaaggcctaaaagcattctacaagggggttgctcctctctggatgagacagataccatacaccatgatgaagttcgcctgctttgaacgtactgttgaagcactgtacaagtttgtggttcctaagccccgcagtgaatgttcaaagccagagcagctggttgtaacatttgtagcaggttacatagctggagtcttttgtgcaattgtttctcaccctgctgattctgtggtatctgtgttgaataaagaaaaaggtagcagtgcttctctggtcctcaagagacttggatttaaaggtgtatggaagggactgtttgcccgtatcatcatgattggtaccctgactgcactacagtggtttatctatgactccgtgaaggtctacttcagacttcctcgccctcctccacccgagatgccagagtctctgaagaagaagcttgggttaactcagtagttagatcaaagcaaatgtggactgaatctgcttgttgatcagtgttgaagaaagtgcaaaaggaacttttatatatttgacagtgtaggaaattgtctattcctgatataattactgtagtactcttgcttaaggcaaaagtttcagatttactgttgaaataaacccaactcttcatgaaaaaaaaaaaa

SEQ ID NO: 323 - DNA, 2912 bp, Homo sapiens
  misc_feature: Incyte ID No: 3146342CB1
cacacgtgtgcgcttctctgctccggagctgctgctgctcctgctctcagcgccgcagtggaaggcaggaccgaaccgctccttctttaaatatataaatttcagcccaggtcagcctcggcggcccccctcaccgcgctcccggcgcccctcccgtcagttcgccagctgccagccccgggaccttttcatctcttcccttttggccggaggagccgagttcagatccgccactccgcacccgagactgacacactgaactccacttcctcctcttaaatttatttctacttaatagccactcgtctctttttttccccatctcattgctccaagaatttttttcttcttactcgccaaagtcagggttccctctgcccgtcccgtattaatatttccacttttggaactactggccttttctttttaaaggaattcaagcaggatacgtttttctgttgggcattgactagattgtttgcaaaagtttcgcatcaaaaacaacaacaacaaaaaaccaaacaactctccttgatctatactttgagaattgttgatttcttttttttattctgacttttaaaaacaacttttttttccacttttttaaaaaatgcactactgtgtgctgagcgcttttctgatcctgcatctggtcacggtcgcgctcagcctgtctacctgcagcacactcgatatggaccagttcatgcgcaagaggatcgaggcgatccgcgggcagatcctgagcaagctgaagctcaccagtcccccagaagactatcctgagcccgaggaagtccccccggaggtgatttccatctacaacagcaccagggacttgctccaggagaaggcgagccggagggcggccgcctgcgagcgcgagaggagcgacgaagagtactacgccaaggaggtttacaaaatagacatgccgcccttcttcccctccgaaactgtctgcccagttgttacaacaccctctggctcagtgggcagcttgtgctccagacagtcccaggtgctctgtgggtaccttgatgccatcccgcccactttctacagaccctacttcagaattgttcgatttgacgtctcagcaatggagaagaatgcttccaatttggtgaaagcagagttcagagtctttcgtttgcagaacccaaaagccagagtgcctgaacaacggattgagctatatcagattctcaagtccaaagatttaacatctccaacccagcgctacatcgacagcaaagttgtgaaaacaagagcagaaggcgaatggctctccttcgatgtaactgatgctgttcatgaatggcttcaccataaagacaggaacctgggatttaaaataagcttacactgtccctgctgcacttttgtaccatctaataattacatcatcccaaataaaagtgaagaactagaagcaagatttgcaggtattgatggcacctccacatataccagtggtgatcagaaaactataaagtccactaggaaaaaaaacagtgggaagaccccacatctcctgctaatgttattgccctcctacagacttgagtcacaacagaccaaccggcggaagaagcgtgctttggatgcggcctattgctttagaaatgtgcaggataattgctgcctacgtccactttacattgatttcaagagggatctagggtggaaatggatacacgaacccaaagggtacaatgccaacttctgtgctggagcatgcccgtatttatggagttcagacactcagcacagcagggtcctgagcttatataataccataaatccagaagcatctgcttctccttgctgcgtgtcccaagatttagaacctctaaccattctctactacattggcaaaacacccaagattgaacagctttctaatatgattgtaaagtcttgcaaatgcagctaaaattcttggaaaagtggcaagaccaaaatgacaatgatgatgataatgatgatgacgacgacaacgatgatgcttgtaacaagaaaacataagagagccttggttcatcagtgttaaaaaatttttgaaaaggcggtactagttcagacactttggaagtttgtgttctgtttgttaaaactggcatctgacacaaaaaaagttgaaggccttattctacatttcacctactttgtaagtgagagagacaagaagcaaattttttttaaagaaaaaaataaacactggaagaatttattagtgttaattatgtgaacaacgacaacaacaacaacaacaacaaacaggaaaatcccattaagtggagttgctgtacgtaccgttcctatcccgcgcctcacttgatttttctgtattgctatgcaataggcacccttcccattcttactcttagagttaacagtgagttatttattgtgtgttactatataatgaacgtttcattgcccttggaaaataaaacaggtgtataaagtggagaccaaatactttgccagaaactcatggatggcttaaggaacttgaactcaaacgagccagaaaaaaagaggtcatattaatgggatgaaaacccaagtgagttattatatgaccgagaaagtctgcattaagataaagaccctgaaaacacatgttatgtatcagctgcctaaggaagcttcttgtaaggtccaaaaactaaaaagactgttaataaaagaaactttcagtcagaataagtctgtaagttttttttttcctttttaattgtaaatggttctttgtcagtttagtaaaccagtgaaatgttgaaatgttttgacatgtactggtcaaacttcagaccttaaaatattgctgtatagctatgctaacggttttttcctttgttttggtatatgtaaccatacctatattattaaaatagatg

SEQ ID NO: 324 - DNA, 1510 bp, Homo sapiens
  misc_feature: Incyte ID No: 040573CB1
cgcgaggctctgcggagaccaggagtcagactgtaggacgacctcgggtcccacgtgtccccggtactcgccggccggagcccccggcttcccggggccgggggaccttagcggcacccacacacagcctactttccaagcggagccatgtctggtaacggcaatgcggctgcaacggcggaagaaaacagcccaaagatgagagtgattcgcgtgggtacccgcaagagccagcttgctcgcatacagacggacagtgtggtggcaacattgaaagcctcgtaccctggcctgcagtttgaaatcattgctatgtccaccacaggggacaagattcttgatactgcactctctaagattggagagaaaagcctgtttaccaaggagcttgaacatgccctggagaagaatgaagtggacctggttgttcactccttgaaggacctgcccactgtgcttcctcctggcttcaccatcggagccatctgcaagcgggaaaaccctcatgatgctgttgtctttcacccaaaatttgttgggaagaccctagaaaccctgccagagaagagtgtggtgggaaccagctccctgcgaagagcagcccagctgcagagaaagttcccgcatctggagttcaggagtattcggggaaacctcaacacccggcttcggaagctggacgagcagcaggagttcagtgccatcatcctggcaacagctggcctgcagcgcatgggctggcacaaccgggtggggcagatcctgcaccctgaggaatgcatgtatgctgtgggccagggggccttgggcgtggaagtgcgagccaaggaccaggacatcttggatctggtgggtgtgctgcacgatcccgagactctgcttcgctgcatcgctgaaagggccttcctgaggcacctggaaggaggctgcagtgtgccagtagccgtgcatacagctatgaaggatgggcaactgtacctgactggaggagtctggagtctagacggctcagatagcatacaagagaccatgcaggctaccatccatgtccctgcccagcatgaagatggccctgaggatgacccacagttggtaggcatcactgctcgtaacattccacgagggccccagttggctgcccagaacttgggcatcagcctggccaacttgttgctgagcaaaggagccaaaaacatcctggatgttgcacggcagcttaacgatgcccattaactggtttgtggggcacagatgcctgggttgctgctgtccagtgcctacatcccgggcctcagtgccccattctcactgctatctggggagtgattaccccgggagactgaactgcagggttcaagccttccagggatttgcctcaccttggggccttgatgactgccttgcctcctcagtatgtgggggcttcatctctttagagaagtccaagcaacagcctttgaatgtaaccaatcctactaataaaccagttctgaaggtgaaaaaaaaaaaa

SEQ ID NO: 325 - DNA, 10400 bp, Homo sapiens
  misc_feature: Incyte ID No: 1383326.3
  unsure 6575, 6584, 6592, 6595, 9945: a, t, c, g, or other
ggcggtgcctgggaagccgtgcgcgtcccccggcggcggcagcagcgggaggcgaggggcgccaccgaggagccgagcccgccgagccgggcgctctatttcagcgggcgaggcgagcagctgcgagtcctccgggccgacctcgagctgccccgggacgcgttcacgctgcaagtgtggctgcgagcggaggggggccagaggtctccggcagtgatcacagggctgtatgacaaatgttcttatatctcacgtgaccgaggatgggtcgtgggcattcacaccatcagtgaccaagacaacaaagacccacgctactttttctccttgaagacagaccgagcccggcaagtgaccaccatcaatgcccaccgcagctacctcccaggccagtgggtatacctagctgccacctatgatgggcagttcatgaagctctatgtgaatggtgcccaggtggccacctctggggaacaagtgggtggcatattcagcccactgacccagaagtgcaaagtgctcatgttagggggcagtgccctgaatcacaactaccggggctacatcgagcacttcagtctgtggaaggtggccaggactcagcgggagatactgtctgacatggaaacccatggcgcccacactgctctacctcagctcctcctccaggagaactgggacaatgtgaagcatgcctggtcccccatgaaggatggcagcagccccaaagtggaattcagcaatgcccacggctttctgctggacacgagtctggagcctcctctgtgcggacagacattgtgtgacaacacagaggtcattgccagctacaatcagctctcaagtttccgccagcccaaggtggtgcgctaccgcgtggtcaacctctatgaagatgatcataagaacccgacggtgacgcgcgagcaggtggacttccagcaccatcagctggctgaggccttcaagcaatacaacatctcctgggagctggacgtgctggaggtgagcaactcctcccttcgccgccgcctcatcctggccaactgtgacatcagcaagattggggatgagaactgtgaccccgagtgcaaccacacgctgacgggccacgacggcggggattgccgccacctgcgccaccctgccttcgtgaagaagcagcacaacggggtgtgtgacatggactgcaactatgaacggttcaactttgatggtggagagtgctgtgaccctgaaatcaccaatgtcactcagacttgctttgaccccgactctccacacagagcctacttggatgttaatgagctgaagaacattcttaaattggatggatcaacacatctcaatattttctttgcaaaatcctcagaggaggagttggcaggagtagcaacttggccatgggacaaggaggccctgatgcacttaggtggcattgtcttgaacccatctttctatggcatgcctgggcacacccacaccatgatccatgagattggtcacagcctgggcctctatcacgtcttccgaggcatctcagaaatccagtcctgcagtgacccctgcatggagacagagccctccttcgagactggagacctctgcaatgataccaacccagcccctaaacacaagtcctgtggtgacccagggccaggaaatgacacctgtggctttcatagcttcttcaacactccttacaacaacttcatgagctatgcagatgacgactgtacggactccttcacgcccaatcaagtcgccagaatgcactgttacctggacctggtctaccagggctggcagccctccaggaaaccagcgcctgttgccctcgccccccaagttctgggccacacaacggactctgtgacactggagtggttcccacctatagatggccatttctttgaaagagaattgggatcagcatgtcatctttgcctggaagggagaatcctggtgcagtatgcttccaacgcttcctccccaatgccctgcagcccatcaggacactggagccctcgtgaagcagaaggtcatcctgatgttgaacagccctgtaagtccagtgtccgcacctggagcccaaattcagctgtcaacccacacacggttcctccagcctgccctgagcctcaaggctgctacctcgagctggagttcctctaccccttggtccctgagtctctgaccatttgggtgacctttgtctccactgactgggactctagtggagctgtcaatgacatcaaactgttggctgtcagtgggaagaacatctccctgggtcctcagaatgtcttctgtgatgtcccactgaccatcagactctgggacgtgggcgaggaggtgtatggcatccaaatctacacgctggatgagcacctggagatcgatgctgccatgttgacctccactgcagacaccccactctgtctacagtgtaagcccctgaagtataaggtggtccgggaccctcctctccagatggatgtggcctccatcctacatctcaataggaaattcgtagacatggatctaaatcttggcagtgtgtaccagtattgggtcataactatttcaggaactgaagagagtgagccatcacctgctgtcacatacatccatggaagtgggtactgtggcgatggcattatacaaaaagaccaaggtgaacaatgcgacgacatgaataagatcaatggtgatggctgctcccttttctgccgacaagaagtctccttcaattgtattgatgaacccagccggtgctatttccatgatggtgatggggtatgtgaggagtttgaacaaaaaaccagcattaaggactgtggtgtctacacgccccagggattcctggatcagtgggcatccaatgcttcagtatctcatcaagaccagcaatgcccaggctgggtcatcatcggacagccagcagcatcccaggtgtgtcgaaccaaggtgatagatctcagtgaaggcatttcccagcatgcctggtacccttgcaccatcagctacccatattcccagctggctcagaccactttttggctccgggcgtatttttctcaaccaatggttgccgcagctgtcattgtccacctggtgacggatgggacatattatggggaccaaaagcaggagaccatcagcgtgcagctgcttgataccaaagatcagagccacgatctaggcctccatgtcctgagctgcaggaacaatcccctgattatccctgtggtccatgacctcagccagcccttctaccacagccaggcggtacgtgtgagcttcagttcgcccctggtcgccatctcgggggtggccctccgttccttcgacaactttgaccccgtcaccctgagcagctgccagagaggggagacctacagccctgccgagcagagctgcgtgcacttcgcatgtgagaaaactgactgtccagagctggctgtggagaatgcttatctcaattgctccagcagcgaccgctaccacggtgcccagtgtactgtgagctgccggacaggctacgtgctccagatacggcgggatgatgagctgatcaagagccagacgggacccagcgtcacagtgacctgtacagagggcaagtggaataagcaggtggcctgtgagccagtcgactgcagcatcccagatcaccatcaagtctatgctgcctccttctcctgccctgagggcaccacctttggcagtcaatgttccttccagtgccgtcaccctgcacaattgaaaggcaacaacagcctcctgacctgcatggaggatgggctgtggtccttcccagaggccctgtgtgagctcatgtgcctcgctccaccccctgtgcccaatgcagacctccagaccgcccggtgccgagagaataagcacaaggtgggctccttctgcaaatacaaatgcaagcctggataccatgtgcctggatcctctcggaagtcaaagaaacgggccttcaagactcagtgtacccaggatggcagctggcaggagggagcttgtgttcctgtgacctgtgacccacctccaccaaaattccatgggctctaccagtgtactaatggcttccagttcaacagtgagtgtaggatcaagtgtgaagacagtgatgcctcccagggacttgggagcaatgtcattcattgccggaaagatggcacctggaacggctccttccatgtctgccaggagatgcaaggccagtgctcggttccaaacgagctcaacagcaacctcaaactgcagtgccctgatggctatgccatagggtcggagtgtgccacctcgtgcctggaccacaacagcgagtccatcatcctgccaatgaacgtgaccgtgcgtgacatcccccactggctgaaccccacacgggtagagagagttgtctgcactgctggtctcaagtggtatcctcaccctgctctgattcactgtgtcaaaggctgtgagcccttcatgggagacaattattgtgatgccatcaacaaccgagccttttgcaactatgacggtggggattgctgcacctccacagtgaagaccaaaaaggtcaccccattccctatgtcctgtgatctacaaggtgactgtgcttgtcgggacccccaggcccaagaacacagccggaaagacctccggggatacagccatggctaaggaaggacaagaagttgtcaaagaattcccaacgccaggacccacatccctttggtattgatttcacagtcagctgctcaacggaatggcctctccacaccagggatccttagcacccaaccggtctgcctttaattttacccaggaaggactcacattggggcgaatgaaccaagtttcgccatgctggatgatgaaatggattcccatcccaaagtctgagatggattgcatatacagtgtgcagtcccagagcctcctaaaattctagccatttgtcacacaaccacagcaagaaacgtgttctatatctagagtgtgcccatctgtgtttagtacacatgcatgcatacacacccatacaaacatctgtgtgagggcagttctggagatgagcagagagagaccggaataaactcaatcttttctttcccaagctcctagccaacactatccttgggagaaagaaatttgcagaaactgctaagaccaagtgtggagatgtcaagctagttcacactctgaggctcagaatatgtaggacatgcacaattgtgcagtcctttgggattggaagtgaaacagtctgtgatcccctaccttctagggaactaggacctaggaagaggtaaagattatcaggtatgcaaagcgccccaattcttctgctgccatgggggattttaccccaactccagggttcgaggccaatctgagaatggcttaggattgcaatgtcaaggtattatatcagccccttgcttgaggcttgaggtcataatatccctctaggacttacctgttcccccagatcttgccttgggaccacatttgctgctacttttcctgctgctctatcctatacattgaataatccaagatggtagaactaggttaggaaaaattccacacaaccaaacagtctgccttaaaagtgacccacatttttccatagctcctcactttttagcccttctgcaagagaaaaaccctcatgggtccacatggtgagaagttaagtttcctgtaagtgggcctctcaccctggaaaggagttgagggacatcagatgctggaaccctcactgaaagtccagaatgtctaagccagtgttagattttgtaaacaagtggaacagtgttaaatttctatgatgttggagccatccagagactactggaattgtcgagacttttggattattatccttatccttatcctaatcttcctagcccttcaggctagagtaggcttcgatcctgagaaccttgctgttgctctgaggagatataattctgggagaaagaatcttttataagaacagtacagattgttctcaagagggccatcagaaggaagccaaagagttcacagcctcagcaccaacaactcaacatggtcatcatgttttctatatggtttttccagctagcagtactcccttccatacctgtgactgggcagtgcttttctctctcccatgtctagcctccaaaagttaagtgaaaattagtcaactgcacgtggaagcccccaccactttggggatctctttatttcttttcagccagggacctgtccactccctttgaattaatatgggaagaaattaatacaggatgaactggagagaagggttgagtgtggcatactttctgaaacctggagctgggaattgcggagaagggaaggtctagactagttacatcacatagggattactgtaaatcaagtcatctcaagtctagtgaagacagccaacagaaacaaaacctagcatagggatagaaaataccatgcacgtgtgcagccccacctaattcctgcatccaaggcaggtgttgttaatctatcatagcacttaaaaaaaaaaaaaaaaaagngaccaaaantaaccttnggnaccaccatattatatcactcccaatagcactgacctggtgatcaaaaacacttgagaagacatctattggccatctctggccaattacactaagaaacatatcaaggtgcttttggcacaggtgcccacaaatacggatgcagtgctgagatagtttatgagacttgtaccatttcacaaactctgaaattgggttccatattggcaaggctgccacagttgttaagaataatcctctatgtttcttcctcacaaaaccatatctcatttatatccagaccattacttcactataattacaaggacaaattattagcaagaaataagaatagtattagaagaattgatcctattttgaacccctctccagtatcttcacactcttgtcaactctccaggcctctctcttgccctgagttatcagcctgtgtggtgttaactaccttagaaggtacaagctaagaaatgtaacagtatcaaccctcccagttgcttaattatacccataggtaatacaaaaagctctgaagacccaaagatgacattactaatgatgtgatttcaggagccacagaagaaccttaccagcttccctcaaatcagtccttatcctctttctatcttcactcccatcatcatctattttcacactatccagctaagcaaagattcctggaggctgacttgtatcttcagactcacagagtgaattcagctcttctgaatcaagacccacccagtctctttcattcagacctgttgctaacaaatttatatttgccaaggatattaggcaaaagaggctacttgattggtggccaacctcgtgcccacatggaaggtatctttaatagggtcttttcaaaccttagtggaggagggtcagctcaatttgggcaatgcatttgttcccagtttcattttcttcctgggaattaactcgtcatttcattccttcagtcatcttctgtgtaggtgaccggagcactgagaggcagctctgatgcactattgtgtgtcagcagctcaaaggccctaaaacactgaaggttctgcatctgaagtattagattgttagcagcaaaatatgaaagatgaggtggacagtcctctaagccctatttagggaagcttttccaagccacaatcttaactacctacccaaaggatttgcattacccccagattctgtgccaacaaccttttaaggaaatacagtccttgggaaatgagttttgatggtgaattggggtgttaaggaagggaaagattgtcatagatggtagggctttgaaaatgcagggtatcagctgccactcctggcttcaacacattgagtcactgcctagacggttctcttggtcttattcccatcctggccaatgcttaaatactatttgttgaaaataattctttgagacagatttcagctacctcccttccaggttcgatttaacttggttgtaattgtcaatttgttgttataggtcttacctgtgtgaaagaaagaaaaagaaagaaagaaagaaagagaaaggaaattataaggtcaagttaacagttttgaggttttgtgtttttttctggaactacttcaagtgagaaaataaaaaaaaatggtgacaaagctgtacagatagagataatagaagacaaagagattaaaaggaaataaaaatgcatgattaaaaactaagaataaaaaacctatttttatgtttcctaaaggaaattgtttattctacagactcagtaggtagacacaaacataaagatttccctagaagacatagagtgggatttgataacactgtctgttattttctgtacattgtggtaggtccaggaaatatgacattttcccccttgatgtgttattgttgttgttgggtggggtgggcattttgtttatttgtttggtggcaatcagtggtagtagggagtgggagggcttatattggtttttccagctattaaggggacatattgtgtcgttgtgcttttcacgttataaaatgtttatatttaccagtacagcactgggctttataaagactgcactcagaaccacactgcacagtccagttttttaaaaagctgctacatgacagacaggtaatcccactgagtgagttttgagaaacaaatcaaacgaagtaaacaagaaacataaaaaccaaatagcaaatgaataaaagcctgttcttgtaacttattcaacttttgccaaattcctaccaatcacttgctttttaaaagaaatgtataatagccaaaagagaaattatgtccctgttgtacagaagttagaatttttgactccaggcagcagtttgctcagtgatcttgaacaagttatccaattgcctctacatttgcatcagtttctctagctgcaaaatgggggataatactatatacctacctcacagtgggagggcaggagattttgaggccctgaggttttaggtgggctgtgagggccaacgcttgacacaaagtccatgggttattattcaagaatgcacaggcccatcggccttttagaaagacaagacagggagtgcttgtttgatatttcaaggaataaagccggagctcctgaattgtagtccaccttaaaagagagacctgtattggagaatattttatttttttggcaaatttgatcttaccctttaccagttctataatttggttaaaagctgattacgtcctacaatgtcaaagtcagctaactgtcgtctacttaagacttctggtcatttccaacttatagaggaagggagtctctaaaatctcttcttcagaaggcacctcacttctcagacttaaaattccacatcaagtgttccattaaaagaagataaggcattctgagtgcaaacaaatgggggcttcttaaactacacaccagcagtcagtgaggaaaactttgaacaattattgagttgctttcttgggtctctataatcaataacctgtctgcagatatctatctatataaagatattatatataaatataaatttacatatatatgccacatgtatatatagttgtaccatatatgtgtgtatatatatacttaaatgtaatatttacaaaataaaactgtgatctcgtctagagaaaatgtattcatattacaaactgctcttccatatttatgtaccatattatacctttttattgttgttataattattatgggtatttctaattaatatgatgttgaaacctgtttggcaccttctggaagctaccaaaaaaatgacactccattgaagtgcttaaaagctgttctcataagaattctactggcctattgtaaaaaagaaaaaaaaaangaaaaagaagaaagacacaaagaaaataatctaaacaccaaaaactaaacacaattccaatcctttttctgtacctcacgcgcataaatttgctgctcctatttttttttctgtttatgtgtttttatggatctaagttaaatcttttggcaatatataaaaatgtaaatagtaaactttatttattaagaatgtcatcttttttaatttatatttacacaattgttcatctaatttattttttctatacagttttaaatactcagacatattttgctgttcatgatatttttatcctgttctcatggatttgttttcccatactgttttctctgatctcaattacaggttggatctcacaaataataatgtcagagacagaaatattttgccactgttgattactatactttaaagttctatattatgaaaatatataatagcttgtacgcttc

SEQ ID NO: 326 - DNA, 2541 bp, Homo sapiens
  misc_feature: Incyte ID No: 031130.2
tgttaggagcacttttattaggatcttttgaagcctttcaagagttttctttcagttattattaatagtactaataaagaaggtgagcaggatttaaagctgaaaggagcatcagagataattgaactttgtttatgccattcattgttaccctatgcaatgtcttttgtttgtttttaattaattgccaatatttaagaagagggtcatagaacagtcattattccagattctcttgaaaaactggaagatctggcaactacaggtttatgttcttgcatgttaacaatatacaggggctggaattaacctgctctgagtccctttagatgtgcatactctctccgatttgccacagttcccaccaattcttatttctcctctctttacttggcccacatcattgggcctatctccattaatttctattaaatattttattactgagggccattagtttatgacccctgagggccaagacagctggttaaagaacttgcattactggtggcaaaattatacctttacgattacttactaggttttagaaatctcacttttctaacaagaggtattatggtaatcataagttcaaaataattaaagttcatttgagataattaaatcaaaacctctagtctgggttggagggtgataaagttatctggcggaattttttaactttctgttacctatcctcttctgctaaatgaataggtacaaatgaatcctagatttgtttacggcagtttacttacttgaagttgggagaatttttttttttctttaaaggactgagtctggctctgttgcctaggctcaagtactgtggatcttggctcactgcagcctccacctcttggattcaagcagttctcctgcctcagcctcccgagtagctgggagccaccatgtccagctgatttttgtatttttagtaaatgagttttcaccatgttggccaggctggtcttgaactcctgacctcaagtgagctgcctacctggcctcccaaagctctgggattataggtgtgagccactgtgccaggcctgaggttgggagaaattttgtccatttctttagaaccaaaattggcaaccagagagtatttggatgttacacaaaatatttagtttccctttctagcctaaattgggttgtttatagcacccgtctctcccatttgagaaaaataggttaggatgctggtgcagggatgaggccttattaaaacagagaaggtacccaaatggtggttcaaacacaggctggctaataagctgtgaggtgacttaccaacccaccccaacaacaaaaacccttgaacttctgctttcaacttccacctcatgctagactacccggtccaatcctcctggtctaacacctggctacatataacaaccaccatctgctcgaatgtgttcgaaaggtgatgattaatctgccaggctgatatattaaataaaatggaaatctcaaaagttgaacttgctattcagtctgcttttgctctggaggggggatttgttagccaagaagaggctgaaaacatgagtagtgtactttgggagactagaaggacgaacgttaaaagtatacgacctccaaggttgtgactctggtagaattctttggttagagatcctgaaggacagcatcctagggataatggtgaaacagaagtagaccattcacatagagtgtagtttagcattaaatcatcaaggtggattagtaaattgtgagattttggaagtggactaaggtgaccttaggtttctaatgcccctaggaacctgaaagatagaaacctggaggaagaatattttcctaggcctcaaattatttgggtactttttcaaatacagtatctccacataccctggatacaggaggagaaaggcggaatgagaaactggcagaaacagtagacccaaaggggcaccaaataattgcattgtgaggtagactttaagtatgtttactgtattcaaggagataaaagatggaaaatttccatatagaattggaaactataaaaaagtcactgcagatttgttaaaaaaaaaagaaagccaatataaatttgaaaacttgaaaaaccaaacagtgaaaattaagaactccaaatgtgttagttatctattggctgtgtaacatactgctcaaacttgacttacatacgtttattatctcagtttttgttggtcaggaatccaagcatggcctaagtgggttctctgctttaggctgcaatcaaagcatatggtcggggtagggtctcctctggaggctgagctggggaaggatctgcttcagatttatgtagttgctagcaggttcttggactgaggacctcagtagcttcctggctgttggatgaaagcaattcttcagttccttgtcccatggacctctcctttaggacagcttacaacctggacagcttgccagagggaacctatagagcccatagagtgagtctgctaacaagacacctgaagagagaaataaccaaaaaaaacaaaaacaaaa

SEQ ID NO: 327 - DNA, 5049 bp, Homo sapiens
  misc_feature: Incyte ID No: 331734.3
ggcgcacgcacaggagcctgcactctgcgtcccgcaccccagcagccgcgccatgagccggagtctcttgctccggttcttgctgttcctgctcctgctcccgccgctccccgtcctgctcgcggacccaggggcgcccacgccagtgaatccctgttgttactatccatgccagcaccagggcatctgtgtccgcttcggccttgaccgctaccagtgtgactgcacccgcacgggctattccggccccaactgcaccatccctggcctgtggacctggctccggaattcactgcggcccagcccctctttcacccacttcctgctcactcacgggcgctggttctgggagtttgtcaatgccaccttcatccgagagatgctcatgcgcctggtactcacagtgcgctccaaccttatccccagtccccccacctacaactcagcacatgactacatcagctgggagtctttctccaacgtgagctattacactcgtattctgccctctgtgcctaaagattgccccacacccatgggaaccaaagggaagaagcagttgccagatgcccagctcctggcccgccgcttcctgctcaggaggaagttcatacctgacccccaaggcaccaacctcatgtttgccttctttgcacaacacttcacccaccagttcttcaaaacttctggcaagatgggtcctggcttcaccaaggccttgggccatggggtagacctcggccacatttatggagacaatctggagcgtcagtatcaactgcggctctttaaggatgggaaactcaagtaccaggtgctggatggagaaatgtacccgccctcggtagaagaggcgcctgtgttgatgcactacccccgaggcatcccgccccagagccagatggctgtgggccaggaggtgtttgggctgcttcctgggctcatgctgtatgccacgctctggctacgtgagcacaaccgtgtgtgtgacctgctgaaggctgagcaccccacctggggcgatgagcagcttttccagacgacccgcctcatcctcataggggagaccatcaagattgtcatcgaggagtacgtgcagcagctgagtggctatttcctgcagctgaaatttgacccagagctgctgttcggtgtccagttccaataccgcaaccgcattgccatggagttcaaccatctctaccactggcaccccctcatgcctgactccttcaaggtgggctcccaggagtacagctacgagcagttcttgttcaacacctccatgttggtggactatggggttgaggccctggtggatgccttctctcgccagattgctggccggatcggtgggggcaggaacatggaccaccacatcctgcatgtggctgtggatgtcatcagggagtctcgggagatgcggctgcagcccttcaatgagtaccgcaagaggtttggcatgaaaccctacacctccttccaggagctcgtaggagagaaggagatggcagcagagttggaggaattgtatggagacattgatgcgttggagttctaccctggactgcttcttgaaaagtgccatccaaactctatctttggggagagtatgatagagattggggctcccttttccctcaagggtctcctagggaatcccatctgttctccggagtactggaagccgagcacatttggcggcgaggtgggctttaacattgtcaagacggccacactgaagaagctggtctgcctcaacaccaagacctgtccctacgtttccttccgtgtgccggatgccagtcaggatgatgggcctgctgtggagcgaccatccacagagctctgaggggcaggaaagcagcattctggaggggagagctttgtgcttgtcattccagagtgctgaggccagggctgatggtcttaaatgctcattttctggtttggcatggtgagtgttggggttgacatttagaactttaagtctcacccattatctggaatattgtgattctgtttattcttccagaatgctgaactccttgttagcccttcagattgttaggagtggttctcatttggtctgccagaatactgggttcttagttgacaacctagaatgtcagatttctggttgatttgtaacacagtcattctaggatgtggagctactgatgaaatctgctagaaagttagggggttcttattttgcattccagaatcttgactttctgattggtgattcaaagtgttgtgttcctggctgatgatccagaacagtggctcgtatcccaaatctgtcagcatctggctgtctagaatgtggatttgattcattttcctgttcagtgagatatcatagagacggagatcctaaggtccaacaagaatgcattccctgaatctgtgcctgcactgagagggcaaggaagtggggtgttcttcttgggacccccactaagaccctggtctgaggatgtagagagaacaggtgggctgtattcacgccattggttggaagctaccagagctctatccccatccaggtcttgactcatggcagctgtttctcatgaagctaataaaattcgctttctaaagttacctgttatatatctcttttggtcccatcctctaaagcagaggcaacactggaacatggctagcctttcttgtagccatggctgggcgtgctagaggttgcagcatgagactttctgctgggatccttgggcccatcactgtatagacatgctaccactggtacttcctttctccctgcgggccaggcactgcccttttcaggaagctctcttaaaatacccattgccccagacctggaagatataacattcagttcccaccatctgattaaaacaacttcctcccttacagagcatacaacagagggggcaccggggaggagagcacatactgtgttccaatttcacgcttttaattctcatttgttctcacaccaacagtgtgaagtgcgtggtataatctccatttcaaaaccaaggaagcagcctcagagtggtcgagtgacacacctcacgcaggctgagtccagagcttgtgctcctcttgattcctggtttgactcagttccaggcctgatcttgcctgtctggctcagggtcaaagacagaatggtggagtgtagcctccacctgatattcaggctactcattcagtcccaaatatgtattttcctaagtgtttactatgtgccagttcctgtaacaggtgtggggacacagcagtgagtaatcaatacagacaaggttctgcccttatggagctcacactccagtggcagacaaacagaccataaataaggaaacgatgaaataagatatatacaaggtgagtgtgacttcccttctaaccccctctgctctgtcctcccctattgcgctctcaagaccagagacccaacagcagtgatctcagggcagacagccctccactccagctctgagacccttttctcaggacctctgtaggcagcagagagagaggacagaggggtaagatgaggggttgagggaaggttcttcatgatccacactttgggcttagtatttctcaggaagagctatggcccagaaacaacaggggaaactagagttcggtctgacagtccttggggttaagtctcctgtcttatggtccagaaactcctgtttctccttagttggctggaaactgctcccatcattccttctggcctctgctgaatgcagggaatgcaatccttccctgctcttgcagttgctctgacgtagaaagatccttcgggtgctggaagtctccatgaagagcttgtgtcctgtcctttcttgcagattctatttcccctcttctgctaatacctcttactttgcttgagaatcctctcctttcttattaatttcagtcttggtggttctatcaggggtgcattctggccaaggggtgggcctgtgaatcaatcctgggcaatcagacaccctctccttaaaaactggcccgtggagactgagatcactgactctgactcatccccacagctggctctgacaagatggtccatttgttcctgcttccgagatccccagggcagcctggatccctgcccttctcaagactttagcttttccttccatccggtggcctattccaggaattcctcttttgcttaaatcagttggagtttgtgtctgttgcttgtaatcaagcctttatggctgctgggctgagtgacacaagcactttaatggcctggagggacttttaatcagtgaagatgcaatcagacaagtgttttggaaagagcaccctcgagaagggtggatgacagggcagagcaggaaggacaggaagctggcagaacggaggaggctgcagccgtggtccaaccaggagctgatggcagctggggctaggggaagggctttgagggtggaaggatgggatgggttccagaggtattcctctcttaaatgcaagtgcctagattaggtagactttgcttagtattgacaactgcacatgaaagttttgcaaagggaaacaggctaaatgcaccaagaaagcttcttcagagtgaagaatcttaatgcttgtaatttaaacatttgttcctggagttttgatttggtggatgtgatggttggttttatttgtcagtttggttgggctatagcacacagttatttaatcaaacagtaatctaggtgtggctgttgaaggtcattttgtagatgtgattaacatcctacaatcagttgactttaagtgaaagagattacttaaataatttgggtgagctgcacctgattagttgaaaggcctcaagaacaaacactgccagtttcctggaaaagaagaaactttgcctcaagactatagccatcgactcctgcctgagtttccagcctgctagtctgccctatggatttgaagtttgccaaccccaacaattgtgtgaattaatttctaaaaataaagctatatacagccatcctttggtatttgtgggggatttgtttcaggatc

SEQ ID NO: 328 - DNA, 3900 bp, Homo sapiens
  misc_feature: Incyte ID No: 1212989.1
  unsure 1358, 2835, 3049, 3877, 3888: a, t, c, g, or other
gagtgcagcttcagtcttgcacccccagcagaccctccaccctcctggcaacatcccagagtccgggcagaatcagctgttacagccccttaagccatctccctccagtgacaacctctattcagccttcaccagtgatggtgccatttcagtaccaagcctttctgctccaggtcaagggaagatggtgaaaaaagtctgtccttgcaaccagctctgtagaaccagcagcacaaacactgttggggcaacagtgaacagccaagccgcccaagctcagcctcctgccatgacgtccagcaggaagggcacattcacagatgacttgcacaagttggtagacaattgggcccgagatgccatgaatctctcaggcaggagaggaagcaaagggcacatgaattatgagggccctggaatggcaaggaagttctctggcacctgggcaactgtgcatctccatgacctcgaacctgggtggctctgcccccatctctgcagcatcagctacctctctaggtcacttcaccaagtctatgtgccccccacagcagtatggctttccagctaccccatttggcgctcaatggagtgggacgggtggcccagcaccacagccacttgtgccagttccaacctgtgggaactgcctccttgcagaatttcaacatcagcaatttgcagaaatccatcagcaaccccccaggctccaacctgcggaccacttagacctagagacattaactgaatagatctgggggcaggagatggaatgctgagggggtgggtgggggtgggaagtagcctatatactaactactagtgctgcaatttaactggttatttcttgccagtaggggtaatgtttttaatactgctattgagccctcagatatggtagagtctcccccgctcctagttattggaaatgggagtaggaaggataagaactagcttttttgtccaaggggctagcttcagtacctatgctttccctgtttatctatactgcagtaatgaccgatgagcggctaggaaagtcttgttctattaaggatagctggtagaactctatatgtaaatatcaataccctatctgtaatttcgtagtggcgtcggagctcttgcttttggtacatgccctgaaatccctcactcccctcaagaatccgataccacagggacaaatataccacctactgggctctcgtcctaaccctggccctccgtcccttttttttaacccccgtactccttttttgtattttgtttcttgtgggctctttagaaacccaggtgacaaaataccagggtactgggggtggaactctttcttaatgatagggtcattagtggcnttaagcaaaagatattagcagctttgactgcagcattagcaattaggaaaaaaaaaaaaaattaagttccctgcggacatgtaactttggccatcagttttgatgtggaaacactgtgatatataaaatgttgttggacaacagtagttttaagagtaaaatatggaaacggtttaaaaagttccaaaaaaaggctagctctgtcctttacttattggagacactttaactttttcctttgtatttccattgtattagataaataaatgtgaatgtaaaattgtataaattactgtacttgaatacttctgtttcccaggtgttgcttgctggacattttagtgccttggacttctattgcttctgccattagcatcaacttaccagaccccagatcaataaagggcatgtggaaggaaatcgtaggtccatgtgaccccagcagtccagcagtggttatgcccaaagggaaattgaaaaagtatttttttaagtcattcaacaactttgttctagagcaggtgtaaggatgagtagggtgggaagttaggttggccatcagtggttaaaaacagaaagttctgtttcggggaatagtgaggagggggtgttgtaacaaaattgggacaacttgcacagaatggtgtgtgctgggtgaaagacaaagactaaagaatgaggacacaaacgtgactgcctggccagtgactgtcatataaacctttttttatttgagctaggcttgaacagacgtgacctagaagaaactgaacataaagagaagggggtggggggctagttttcaagttgggggaacctggatagtgaaaagtcacagatggagaaaattgctctccagaaaaactggtttggatttgcttttgcgcgtgcctttgttgcacaatgtaccatagcatttcgtcagcttaggggtactacattttagtggaagagttaatctatcatctatctttccacatctggaattaatcattcttaggaaagaagtacgtgtatgtcctactcatttcctttgatgatgtaccaaatggttgcaggatcataatctattgtgccacctttatttctagaagtaacaactaatatgttcacattttcaaatgggatgaatactccccgtaaggtaataactgcaaccaatacagtgttattcagtgctatgcctccttgtaatgggtagttattaattattttcagagctttccggaaatactgtacctaactgggctatgtttagggatctttgttatctctgaagacaaaggaaagaagctagggactcttaaattttggggtgcttcttgactcttagttggggaaactggaaaatatttcccaaccttttacccacgtcaatgggcatattctggggaatcaccaccaccaccaccactaccacagaaagaggctggaggctccttgtaccctgttcattccttaagggccctgctttccntttaataagtaagtaaagttggtctacggcccctaaatatggcaaatgaggagctgaaggtttttaaaaggtagaaaggaaaagggcaagggcttccacccctggctttaaaatgatttatttattctctgctttgtatttccttttgggggagagtaaggatagaaccaaacaaggggctgagtagctgagaaaggggccacccaagagtganaacatactttataccagaggagcagtggagcctcatgcagcacattatcatttgttatttgggtttaataataattttgacatcttttcactcatacacaaaaaaagtcagaactggtgttatttactggttgatttcatccctcctgtgtatgaaataacaagccctagaggaatgaactagtgctactgaactgtttaaattatttttgtgttaatagtacactttgagtatctttttccacatttaaaaagaactttccgaattataaatgttttcccttacattatttaacaatgtacactgttaaaaataaaaataaaaattcaaactttgggggtttcctcagcagccgtgtaagttgtacactttgtgcactaatctctgggtgttgcgcttcttgtaagattgcgcgtttgtgctttcattaagtaacctttagtagacttactatacatgaaaccattcgaaataaacccaacttgcttttgttgagctggtggggtttcatttccagaagattccttcacattctcattggcactattttgagttaagtgcaatttataactgggatctctaattcctgggagctcctttggctgtctccttaacttcgaaaggaatagaaacggtcggctgccggctagtactttcagacttccttatctcaggttcacagcttcccacaatgggtctgagccaaaaaataggaagtcactgcttcaagattagccacagcccagcccaaaataatacgtctaaaaaaattattaaattggctgggagcaatggctcatgcctataattctaggactttctactttnggaagccgatntgggcagacact

SEQ ID NO: 329 - DNA, 5512 bp, Homo sapiens
  misc_feature: Incyte ID No: 238875.46
  unsure 20-21, 63: a, t, c, g, or other
ggaacctctttcaaattcanncaccctctaggtcgactataccgcctagctgcttcacaattngtcccttcctcgccatccatactgccagccttaattcaagttcacattatcacttgattggattattacaaaagcttccctaccaatcggtcgctcttacaccctgggcagcctcctccgatgggcccactccccgcctctttcactttctggagatcactgagctctccatcctctctgggaatttaccgatgcccagaacgcccttctttcccccacacgaccctctcctagtctaactcctgggcgtgctttaagctcagctcaggcagcgtcaccttctctggaaagcccaaacccagccaccccactaccccctacccgcggcccacgctgatgaagacagcagaacacggaggccccgcgttcccgccgcgagagcaggagagaaagattacctcccgcgagctctagcgcgcccggctttccggcgcactccagggggcgtggctcgggtccacccgggctgcgagccggcagcacaggccaataggcaattagcgcgcgccaggctgccttccccgcgccggacccgggacgtctgaacggaagttcgacccatcggcgacccgacggcgagaccccgccccatccccgactgcctgaaccgcgccaggagacggaccgcaagtccagcgtacccacagacgactcaggcgggagacgagcggtgtcatggccgccgacagtgacgatggcgcagtttcagctcccgcagcttccgacggtggtgtcagcaaaagcacaacatctggggaggagctagtagtccaggttcccgtagtggatgtgcaaagcaacaacttcaaggagatgtggccatccctcctgctagccataaagacagctaatttcgtggctgtggacacggagctgagtgggcttggggacaggaagagtttgctgaaccagtgcattgaggaacgttacaaggccgtgtgtcatgctgccaggacccgttctatcctttccctgggcctcgcctgcttcaagcggcagccagacaagggtgaacattcctatctggctcaagtgttcaatctcactctgctgtgcatggaggagtatgtcatagaaccaaagtctgtgcagttcctgatacagcatggcttcaacttcaaccagcagtatgcccaaggcatcccctaccataagggcaatgacaagggtgatgagagccagagccagtcagtacggaccctattcctggagctaatccgagcccgccggcccctggtgctacacaatggccttatagacttggtgttcctgtaccagaacttctatgcacacctccctgagagtctgggaaccttcaccgctgacctgtgtgagatgttcccagcaggcatttatgacaccaaatatgctgctgagtttcatgcccgtttcgtggcctcctacttagaatatgccttccggaaatgtgaacgggaaaatgggaagcagcgggcagctggcagcccacaccttaccctggagttctgcaactatccttccagcatgagggaccatattgattaccgctgctgcctgcccccagcaacccaccgtcctcatcccaccagcatctgtgacaacttctcggcttatggctggtgccccctgggaccacagtgtcctcagtctcacgatattgaccttatcattgacactgatgaggctgcggcagaggacaagcggcgacggcgacgacgtagggaaaaacggaagagggctttattgaacctaccggggacacagacctctggggaagctaaggatggtcctcccaagaagcaggtctgtggggatagcatcaagcctgaagaaaccgagcaggaggtggctgccgatgaaactaggaacctgcctcactccaagcaaggcaacaaaaatgacttagagatggggattaaggcagcaaggcctgaaatagctgatagagctacctcagaagtgccagggagccaagccagtcctaacccagtgcctggggatggattgcaccgggctggttttgatgcctttatgacaggttatgtgatggcctatgtggaagtgagccagggaccgcagccctgcagctctggaccctggctccctgaatgccacaataaggtatatttgagtggcaaagctgtacccctcacagtggccaagagccagttctctcgttcctccaaagcccacaatcagaagatgaagctcacttggggcagtagctgatgcaacttccaccttgctctcaggtggaacagaggtattttgggtctctctagcctgaaatgtcatcctcaactgctactgagtttaggggagggggaatgtcttgacagacatcactgcattgccctggaccgcctcctttatcccagtgtttgaggtacaagtaagaaggctgaccagcacctgtaacactgactttatttttaagtctgaaaatgtcttgggaaagttttacaaaaaaaaaaatcaacagaagcaagttatgaaaatatttgaccagcttcatctttggttatttcttattgcagctctgtaaggacagactgttcccaaagctccagccatggcaggaagggaagcaaatcagtccctgtataaaccatttaaccaattgaatgtatcacatgttgataaatacatagaagcaggccctagggcctacaaaaccagccccactcccaaccacaaggttgaaagtcttatggggcagaacattaagactcctttataaatatgaaaatagattaatcaacaggaaaaggtctttgaataggttagctaagagccatgaccaccacgctgccttgctgtccccttgcatagaaatgtagtgacgtggtctgaccatgcagtaagtgcaaacagcaattactcaaatgtcttagaatactggcaagaagcaccccaatattcaggtctgggaaacagccatgaccattacggcctcttgatcagctccatgttccactcagtagcttatatgccccaagaaaaggcaagagacagacctggggtggggaaagaaccggggtaatagctgcctgccagctcagcctagaactagacatcctctggtcctatctggggaagtacactggagagggtctggtgggaggcagacctccttgctggatttcagaggcttggtatcagctgttggccctaactaggaaggcctctcactgctgcctcccgtcatacacagccaatgggcactgggagcccagaagttgagcctggcttggcctagcctgcctgctctgtaggctccagggaagaatcaaggctgtgcacctagggggccatatggtttcagctgaaggtccatccccaaggtgaggcagggactaaaccccctcacccatcctgctttccctgggtttgcaggcctatgcctgaggtggagaaggtggctggagttgagcctgctggcctttcttctacctccatctcctcagaagcacccgcagggcatggactggtcccctggggcctggacccaaaaccattttcttcctggagaatggagcagtccatagcctcatgggcttgagcagctggtagggcagatgcccggaatggtgggatctctttaactctgtacttgagactacttaggcgtggtgggggcccatcagatagcgattcttcccggcccacaaatggacaagcctcttgatgcaagaactcaggcgaaccaggcaaggaacgccaccggcgaataggtggggccaggggctcctgccagtcagccaggggcatagttccgggccctggtgcatccaggtcaaataccagagagatgacagacttgctgggcaggtcaaaaaacttgatcttgccccccatgaggtcctggcgagcactaaaagggttgactttggggggtgcgggcagcaccatctcgtggccggtagtatgggtccaagacactcactgtacgtgggggcttacgggaaaagatatctgactggcttcgagacagccagatggtacgtcttgggcatggtgacttgtgggggatcttgtcatccagtgagcttagtcgcttcaccccaggtgctttctccaagagtcccctggctgtgggctgcagcttcctatccctctcctgctcttcttcctgtaggcggctcagaatttcctccagggtcttcccaatctccacaaaagatgggcgcagtttgggatccatgttacagcagttgaaagtaagttgcagaaaatctgggggacagtctcccaccatgtgctggaaagcatcatagtccagcccgaaattctctgtgcggggaagatagtccggatcggcctggatgcgggcgatgatctcgcagaggatgataccataagagaacacatctgccttttcattatagggctcatctcggagaacctcaggtgccatccagaatggggaacccaccacggccagcttctcactccccatgctgacatcggggatcttctcagccaggccaaagtcagctaccactgcagagtaaccattctcatccctctttatcaggcagttcttagatgtgaggtcccgatgaaaaatgcctttgaagtgaaggtagctgaggcccactgctatgtcataggccagttttaccctcacagtccaaggcaaatgcaggttactgtctagcaactgttccaggttcccggagttgatatactctgtaagtgcatgcaattgtccttgatgaacacatacacccatgaacctaaggatgttgggatgggagagtctattcatgagctgtacttctttcagcatgtttgcccggttactgctcaatgtgttcatcttaagagccatcacctgaccagaagctcggtgtcgtaccttgaacacttcagaaaagaagccagaccctattttttcacaggtgaaatcatccaaacgcgtcagtctggaaaaggcacttataagagctcgatacgaagatggccaaactcttcccacctggctcacatttccttctcctccaccacctccttcaaactcttcaagacgctccacacgtggaggaaatcctgcaattgaattccgtttgctccgatccatagtctaaataatcacttttttcttcttttaagaaggaactccacacataaatttttgttgaattttacttctcttctggtttgacactgaggcaggactgagcagccagaggggtgcctgcgcgggcaagaggaggagacggcggcaaagagggagcatagtaaccctcacagctcgttggtggcagcggctccttagcctgcggaggcggtgggagcccctagcgcagaagccggcgactcagctaggctagcggcggcggagaacgaggagactactgccatggccccacagtcggggccgctccccccgcctgtttggcggggccaggaggacgatccgaccagcgaagccaacagggcagctggtagctctgctgagctcccg

SEQ ID NO: 330 - DNA, 2794 bp, Homo sapiens
  misc_feature: Incyte ID No: 060151CB1
gtgcctcgcgcagggggtgtgcgaggctgagtccaagagatagcaaatcgagtcttaaataatccggggagaaagacgcccgggtagatttgaggtgcagccttggagggagggattagaagccgctagactttttttcctcccctctcagtagcacggagtccgaattaattggatttcattcactggggaggaacaaaaactatctgggcagcttcattgagagagattcattgacactaagagccagcggctgcagctgggtgcagagagaacctccggctttacttctgtctcgtctgccccaaccgctagcctcggcttgggtaaggcgaggcggaattaaaccccgctccgagagcggcagcttcgcgcgcggtgcgctcggcctatgcctgccccgaggggcgtctggtaggcaccccgccctctcccgcagctcgacccccatgatagatacgctcagacccgtgcccttcgcgtcggaaatggcgatcagcaagacggtggcgtggctcaacgagcagctggagctgggcaacgagcggctgctgctgatggactgccggccgcaggagctatacgagtcgtcgcacatcgagtcggccatcaacgtggccatcccgggcatcatgctgcggcgcctgcagaagggtaacctgccggtgcgcgcgctcttcacgcgcggcgaggaccgggaccgcttcacccggcgctgtggcaccgacacagtggtgctctacgacgagagcagcagcgactggaacgagaatacgggcggcgagtcggtgctcgggctgctgctcaagaagctcaaggacgagggctgccgggcgttctacctggaaggtggcttcagtaagttccaagccgagttctccctgcattgcgagaccaatctagacggctcgtgtagcagcagctcgccgccgttgccagtgctggggctcgggggcctgcggatcagctctgactcttcctcggacatcgagtctgaccttgaccgagaccccaatagtgcaacagactcggatggtagtccgctgtccaacagccagccttccttcccagtggagatcttgcccttcctctacttgggctgtgccaaagactccaccaacttggacgtgttggaggaattcggcatcaagtacatcttgaacgtcacccccaatttgccgaatctctttgagaacgcaggagagtttaaatacaagcaaatccccatctcggatcactggagccaaaacctgtcccagtttttccctgaggccatttctttcatagatgaagcccggggcaagaactgtggtgtcttggtacattgcttggctggcattagccgctcagtcactgtgactgtggcttaccttatgcagaagctcaatctgtcgatgaacgatgcctatgacattgtcaaaatgaaaaaatccaacatatcccctaacttcaacttcatgggtcagctgctggacttcgagaggacgctgggactcagcagcccatgtgacaacagggttccagcacagcagctgtattttaccaccccttccaaccagaatgtataccaggtggactctctgcaatctacgtgaaagaccccacacccctccttgctggaatgtgtctggcccttcagcagtttctcttggcagcatcagctgggctgctttctttgtgtgtggccccaggtgtcaaaatgacaccagctgtctgtactagacaaggttaccaagtgcggaattggttaatactaacagagagatttgctccattctctttggaataacaggacatgctgtatagatacaggcagtaggtttgctctgtacccatgtgtacagcctacccatgcagggactgggattcgaggacttccaggcgcatagggtaggaccaaatgatagggtaggagcatgtgttctttagggccttgtaaggctgtttccttttgcatctggaactgactatataattgtcttcaatgaagactaattcaattttgcatatagaggagccaaagagagatttcagctctgtatttgtggtatcagtttggaaaaaaaaatctgatactccatttgattattgtaaatatttgatcttgaatcacttgacagtgtttgtttgaattgtgtttgttttttcctttgatgggcttaaaagaaattatccaaagggagaaagagcagtatgccacttcttaaaacagaacaaaacaaaaaaagaaaattgtgctcttttctaatccaaagggtatatttgcagcatgcttgactttaccaattctgatgacatctttacggacactattatcactaagaccttgttatggcgaagtctttagtctttttcatgtattttcctcatgattttttctctttatgtagtttgactatgccttacctttgtaaatatttttgcttgtgttgtcgcaaaggggataatctgggaaagacaccaaatcatgggctcactttaaaaaaagaaagaataaaaaaaccttcagctgtgctaaacagtatattacctctgtataaaattcttcagggagtgtcacctcaaatgcaatactttgggttggtttctttcctttaaaaaaatttgtataaaactggaagtgtgtgtgtgtgagcatgggtacccatttgataagagaaatgcatttgattgtgaagaagggagagttaaattctccattatgttcgtggtgtaaagtttagagctggaatttattataagaatgtaaaaccttaaattattaataaataactattttggctaaaaaaaaaaa

SEQ ID NO: 331 - DNA, 2000 bp, Homo sapiens
  misc_feature: Incyte ID No: 2515378CB1
cagtgacccaggagctgacacactatggcgcacgtccgaggcttgcagctgcctggctgcctggccctggctgccctgtgtagccttgtgcacagccagcatgtgttcctggctcctcagcaagcacggtcgctgctccagcgggtccggcgagccaacaccttcttggaggaggtgcgcaagggcaacctggagcgagagtgcgtggaggagacgtgcagctacgaggaggccttcgaggctctggagtcctccacggctacggatgtgttctgggccaagtacacagcttgtgagacagcgaggacgcctcgagataagcttgctgcatgtctggaaggtaactgtgctgagggtctgggtacgaactaccgagggcatgtgaacatcacccggtcaggcattgagtgccagctatggaggagtcgctacccacataagcctgaaatcaactccactacccatcctggggccgacctacaggagaatttctgccgcaaccccgacagcagcaccatgggaccctggtgctacactacagaccccaccgtgaggaggcaggaatgcagcatccctgtctgtggccaggatcaagtcactgtagcgatgactccacgctccgaaggctccagtgtgaatctgtcacctccattggagcagtgtgtccctgatcgggggcagcagtaccaggggcgcctggcggtgaccacacatgggctcccctgcctggcctgggccagcgcacaggccaaggccctgagcaagcaccaggacttcaactcagctgtgcagctggtggagaacttctgccgcaacccagacggggatgaggagggcgtgtggtgctatgtggccgggaagcctggcgactttgggtactgcgacctcaactattgtgaggaggccgtggaggaggagacaggagatgggctggatgaggactcagacagggccatcgaagggcgtaccgccaccagtgagtaccagactttcttcaatccgaggacctttggctcgggagaggcagactgtgggctgcgacctctgttcgagaagaagtcgctggaggacaaaaccgaaagagagctcctggaatcctacatcgacgggcgcattgtggagggctcggatgcagagatcggcatgtcaccttggcaggtgatgcttttccggaagagtccccaggagctgctgtgtggggccagcctcatcagtgaccgctgggtcctcaccgccgcccactgcctcctgtacccgccctgggacaagaacttcaccgagaatgaccttctggtgcgcattggcaagcactcccgcaccaggtacgagcgaaacattgaaaagatatccatgttggaaaagatctacatccaccccaggtacaactggcgggagaacctggaccgggacattgccctgatgaagctgaagaagcctgttgccttcagtgactacattcaccctgtgtgtctgcccgacagggagacggcagccagcttgctccaggctggatacaaggggcgggtgacaggctggggcaacctgaaggagacgtggacagccaacgttggtaaggggcagcccagtgtcctgcaggtggtgaacctgcccattgtggagcggccggtctgcaaggactccacccggatccgcatcactgacaacatgttctgtgctggttacaagcctgatgaagggaaacgaggggatgcctgtgaaggtgacagtgggggaccctttgtcatgaagagcccctttaacaaccgctggtatcaaatgggcatcgtctcatggggtgaaggctgtgaccgggatgggaaatatggcttctacacacatgtgttccgcctgaagaagtggatacagaaggtcattgatcagtttggagagtagggggccactcatattctgggctcctggaaccaatcccgtgaaagaattatttttgtgtttctaaaactatggttcccaataaaagtgactctcagcgaaaaaaaaaa

SEQ ID NO: 332 - DNA, 3169 bp, Homo sapiens
  misc_feature: Incyte ID No: 1383215.14
gagcccctggttggaggaagccacaagtccaggaacatgggagtctgggcagggggcaaaggaggcaggaacaggccatcagccaggacaggtggtaaggcaggcaggagtgttcctgctgggaaaaggtgggatcaagcacctggagggctcttcagagcaaagacaaacactgaggtcgctgccactcctacagagcccccacgccccgcccagctataaggggccatgcaccaagcagggtacccaggctgcagaggtgccatggctgagtcacacctgctgcagtggctgctgctgctgctgcccacgctctgtggcccaggcactgctgcctggaccacctcatccttggcctgtgcccagggccctgagttctggtgccaaagcctggagcaagcattgcagtgcagagccctagggcattgcctacaggaagtctggggacatgtgggagccgatgacctatgccaagagtgtgaggacatcgtccacatccttaacaagatggccaaggaggccattttccaggacacgatgaggaagttcctggagcaggagtgcaacgtcctccccttgaagctgctcatgccccagtgcaaccaagtgcttgacgactacttccccctggtcatcgactacttccagaaccagactgactcaaacggcatctgtatgcacctgggcctgtgcaaatcccggcagccagagccagagcaggagccagggatgtcagaccccctgcccaaacctctgcgggaccctctgccagaccctctgctggacaagctcgtcctccctgtgctgcccggggccctccaggcgaggcctgggcctcacacacaggatctctccgagcagcaattccccattcctctcccctattgctggctctgcagggctctgatcaagcggatccaagccatgattcccaagggtgcgctagctgtggcagtggcccaggtgtgccgcgtggtacctctggtggcgggcggcatctgccagtgcctggctgagcgctactccgtcatcctgctcgacacgctgctgggccgcatgctgccccagctggtctgccgcctcgtcctccggtgctccatggatgacagcgctggcccaaggtcgccgacaggagaatggctgccgcgagactctgagtgccacctctgcatgtccgtgaccacccaggccgggaacagcagcgagcaggccataccacaggcaatgctccaggcctgtgttggctcctggctggacagggaaaagtgcaagcaatttgtggagcagcacacgccccagctgctgaccctggtgcccaggggctgggatgcccacaccacctgccaggccctcggggtgtgtgggaccatgtccagccctctccagtgtatccacagccccgacctttgatgagaactcagctgtccagctgcaaaggaaaagccaagtgagacgggctctgggaccatggtgaccaggctcttcccctgctccctggccctcgccagctgccaggctgaaaagaagcctcagctcccacaccgccctcctcaccgcccttcctcgggagtcacttccactggtggaccacgggcccccagccctgtgtcggccttgtctgtctcagctcaaccacagtctgacaccagagcccacttccatcctctctggtgtgaggcacagcgagggcagcatctggaggagctctgcagcctccacacctaccacgacctcccagggctgggctcaggaaaaaccagccactgctttacaggacagggggttgaagctgagccccgcctcacacccacccccatgcactcaaagattggattttacagctacttgcaattcaaaattcagaagaataaaaaatgggaacatacagaactctaaaagatagacatcagaaattgttaagttaagctttttcaaaaaatcagcaattccccagcgtagtcaagggtggacactgcacgctctggcatgatgggatggcgaccgggcaagctttcttcctcgagatgctctgctgcttgagagctattgctttgttaagatataaaaaggggtttctttttgtctttctgtaaggtggacttccagcttttgattgaaagtcctagggtgattctatttctgctgtgatttatctgctgaaagctcagctggggttgtgcaagctagggacccattcctgtgtaatacaatgtctgcaccagtgctaataaagtcctattctcttttatgagaaagaaaaagacaccgtcctttaaagtgctgcagtatggccagacgtggtggctcacacctgcaatcccagcaccttaggaggccgaggcaggaggatccttgaggtcaggagttcgagaccagcctcgccaacatggtgaaaccccatttctactaaaaatacaaaaaattagccaagtgtggtggcatatgcctgtaatcccaactactcagaaggccgaggcaggagaattacttgaacgcaggagaatcactgcagcccaggaggcagaggttgcagtgagccgagattgcaccactgcactccagcctgggtgacagagcaagactccatctcagtaaataaataaataaataaaaagcgctgcagtagctgtggcctcaccctgaagtcagcgggcccaggcctacctcactctctcccttggcagagaagcagacgtccatagctcctctccctcacaagcgctcccagcctgccctccagctgctgctctcccctcccagtctctactcactgggatgaggttaggtcatgaggacaccaaaaacctaaaaataaacaaaaagccaaacaagccttagcttttcttaaagactgaaatgcctggaagtgtccctttatttataaaataacttttgtcatatttcttatacatgtttcttgtaagaaattcagaaactacagacaaagagagtggaaattacccactgtcaggcctctgagcccaagctaagccgatcatatcccctgtgccctgcacgtcatacacccagcatggcctgaagccaactgcaagcatccacaacaagcacagtgcacaccatcagcccagttcctgccttaactgcatgacattccacccattgtgcatttgttcctgccccaccctcaactgcatcaattgcaccttgt

SEQ ID NO: 333 - DNA, 3189 bp, Homo sapiens
  misc_feature: Incyte ID No: 2960079CB1
cgccagtccgccagcccagtacctctctctcctcggccctcgtaagctgtccgcggtctgtttggcccgaacggcggcggaggcgctgatcatggcgacattcatctcggtgcagctgaaaaagacctcagaggtggacctggccaagccgctggtgaagttcatccagcagacttacccaagcggcggggaagagcaggcccagtactgccgcgcggcggaggagctcagcaagctgcgccgcgccgcagtcggtcgtccgctggacaagcacgagggcgcgctcgagacgctcctgagatattatgatcagatttgttctattgaacccaaattcccattttctgaaaatcagatctgcttgacatttacctggaaggatgctttcgataaaggttcactttttggaggctctgtaaaactggctcttgcaagcttaggatatgaaaagagctgtgtgttgttcaattgtgcagccttagctagccaaattgcagcagaacagaacctggataatgatgaaggattgaaaatcgctgctaaacattaccagtttgctagtggtgcctttttacatattaaagagacggttttatctgccttaagtcgagagccgaccgtggacatatctccagatactgttgggaccctcagtcttattatgctggcacaggctcaagaagtattttttttaaaagccacaagagataaaatgaaagatgccatcatagctaaattggctaatcaggctgcagattattttggtgatgctttcaaacagtgtcaatacaaagatactctccccaaggaggtgttccctgtcttggctgcaaagcactgtatcatgcaggccaatgctgagtaccatcagtctatcctggcaaaacagcagaagaaatttggagaagaaattgcaaggttacagcatgcagcagaactgattaaaacagtggcatctcgctatgatgaatatgttaatgtgaaggatttttctgacaaaatcaatcgtgcccttgctgcagcaaagaaggataatgacttcatttatcatgatcgagttccagaccttaaagatctagatcctattggcaaagccacacttgtgaaatctaccccggtcaatgtacccatcagtcagaaatttactgatctgtttgagaagatggttcccgtgtcagtacagcagtctttggctgcctataatcagaggaaagccgatttggttaacagatcaattgctcagatgagagaagccaccactttggcaaatggggtgctagcttcccttaatcttccagcagcaattgaagatgtgtctggagacactgtacctcagtctatattgactaaatccagatctgtgattgaacagggaggcatccagactgttgatcagttgattaaagaactgcctgaattactgcaacgaaatagagaaatcctagatgagtcattaaggttgttggatgaagaagaagcaaccgataatgatttaagagcaaaatttaaggaacgttggcaaaggacaccatccaatgaactgtataagcctttaagagcagagggaaccaacttcagaacagttttagataaagctgtgcaggcagatggacaagtgaaagaatgttaccagtctcatcgtgacaccatcgtgcttttgtgtaagccagagcctgagctgaatgctgccatcccttctgctaatccagcaaagaccatgcagggcagtgaggttgtaaatgtcttaaaatccttattgtcaaatcttgatgaagtaaagaaggaaagagagggtctggagaatgacttgaaatctgtgaattttgacatgacaagcaagtttttgacagccctggctcaagatggtgtgataaatgaagaagctctttctgttactgaactagatcgagtctatggaggtcttacaactaaagtccaagaatctctaaagaaacaggagggacttcttaaaaatattcaggtctcacatcaggaattttcgaaaatgaaacaatctaataatgaagctaacttaagagaagaagttttgaagaatttagctactgcatatgacaactttgttgaacttgtagctaatttgaaggaaggcacaaagttttacaatgagttgactgaaatcctggtcaggttccagaacaaatgcagtgatatagtttttgcacggaagacagaaagagatgaactcttaaaggacttgcaacaaagcattgccagagaacctagtgctccttcaattcctacacctgcgtatcagtcctcaccagcaggaggacatgcaccaactcctccaactccagcgccaagaaccatgccgcctactaagccccagcccccagccaggcctccaccacctgtgcttccagcaaatcgagctccttctgctactgctccatctccagtgggggctgggactgctgcgccagctccatcacaaacgcctggctcagctcctcctccacaggcgcagggaccaccctatcccacctatccaggatatcctgggtattgccaaatgcccatgcccatgggctataatccttatgcgtatggccagtataatatgccatatccaccagtgtatcaccagagtcctggacaggctccatacccgggaccccagcagccttcataccccttccctcagcccccacagcagtcttactatccacagcagtaatatgtctgctcagcagctcagctgattcagatcagagggaaagaaataccaaccctgcaataagtgtactaaactctacgctctggttaatgtaatgtactctcctggactgaatgcagtgtataatttctgtctacagctagaagctgtgccccagttccacatttgattacacatgtgagatttgctgctgttgcagtataaacactaggtataataggatttgaaattgcattacagttcataaaaattgaaaatgagaaattaaacctgcaagtgaaacatttgaaacgattatactttctacataagacatggttgggacatcagatacttacaaagatggtttaagtatggatactagagaaaattaagttttctttctctttggtttattgatttggtttaatttccattatgctattttgcataatcaaggcactgtaaatcttataattttaaaataaattacttaagaacaaaaaaaaaaa

SEQ ID NO: 334 - DNA, 4932 bp, Homo sapiens
  misc_feature: Incyte ID No: 441261.8
gggggcgccgcgggctgcgccgagggtgtggcggcggcgcttacccccgagcggctcctggagtggcaggataaaggaatatttgttatccaaagtgagagtctcaagaaatgcattcaagcaggtaaatcggttctgaccctcggtagaactggaagcaagcaagcaaacaagcacatgctgtggaaatgggtttcaaaccatggcctctttaacataggaggcagcggttgcctgggcctgaatttctccgccccagagcagccattaagcttatatgaatgtgactccaccctcgtttccttacggtggcgctgtaacaggaagatgatcacaggcccgctgcagtactctgtccaggtggcgcatgacaacacagtggtggcctcacggaagtatattcataagtggatttcttatgggtcaggtggtggagacatttgtgaatatctacacaaagatttgcatacaatcaaagggaacacccacgggatgccgtgtatgtttcccttccagtataaccatcagtggcatcatgaatgtacccgtgaaggtcgggaagatgacttactgtggtgtgccacgacaagccgttatgaaagagatgaaaagtggggattttgccctgatcccacctctgcagaagtaggttgtgatactatttgggagaaggacctcaattcacacatttgctaccagttcaacctgctttcatctctctcttggagtgaggcacattcttcatgccagatgcaaggaggtacgctgttaagtattacagatgaaactgaagaaaatttcataagggagcacatgagcagtaaaacagtggaggtgtgggttggcctcaatcagcttgatgaagacgctggctggcagtggtctgatggaacgccgctcaactatctgaattggagcccagaggtaaattttgagccatttgttgaagatcactgtggaacatttagttcatttatgccaagtgcctggaggagtcgggattgtgagtccaccttgccatatatatgtaaaaaatatctaaaccacattgatcatgaaatagttgaaaaagatgcgtggaaatattatgctacccactgtgagcctggctggaatccctacaatcgtaattgctacaaacttcagaaagaagaaaagacctggcatgaggctctgcgttcttgtcaggctgataacagtgcattaatagacataacctcattagcagaggtggagtttcttgtaaccctccttggagatgaaaatgcatcagaaacatggattggtttgagcagcaataaaattccagtttcctttgaatggtctaatgactcttcagtcatctttactaattggcacacacttgagccccacatttttccaaatagaagccagctgtgtgtctcagcagagcagtctgagggacactggaaagtcaaaaattgtgaagaaagacttttttacatttgtaaaaaagcaggccatgtcctctctgatgctgaatcaggatgtcaagagggatgggaggagacatgtggattctgttacaaaattgacacagtccttcgaagctttgaccaagcttccagcggttattactgtcctcctgcacttgtaaccattacaaacaggtttgaacaggcttttattaccagtttgatcagtagtgtggtaaaaatgaaggacagttatttttggatagctcttcaggaccaaaatgatacgggagaatacacttggaagccagtagggcagaaacccgagccggtgcagtacacacactggaacacacaccaaccgcgctacagtggtggctgtgttgccatgcgaggaaggcatccacttggtcgctgggaagtgaagcactgtcggcactttaaggcaatgtccttgtgcaagcagccagttgaaaatcaggaaaaagcagagtatgaagagagatggccctttcacccctgctatttggactgggagtcagagcctggtctggccagttgcttcaaggtatttcatagtgaaaaagttctgatgaaaagaacatggagagaagctgaagcattttgcgaagaatttggagctcatcttgcaagctttgcccatattgaggaagagaattttgtgaatgagctcttacacccaaaatttaattggacagaagaaaggcagttctggattggatttaataaaagaaacccactgaatgccggctcatgggagtggtctgatagaactcctgttgtctcttcgtttttagacaacacttattttggagaagatgcaagaaactgtgctgtttataagccaaacaaaacattgctgcccttacactgtggttccaaacgtgaatggatatgcaaaatcccaagagatgtgaaacccaagattccgttctggtaccagtacgatgtaccctggctcttttatcaggatgcagaatacctttttcatacctttgcctcagaatggttgaactttgagtttgtctgtagctggctgcacagtgatcttctcacaattcattctgcacatgagcaagaattcatccacagcaaaataaaagcgctatccaagtatggtgcaagttggtggattggacttcaagaagaaagagccaatgatgaatttcgctggagagatggaacaccagtgatataccagaactgggacacaggaagagaaagaactgtgaataatcagagccagagatgtggctttatttcttctataacaggactctggggtagtgaagagtgttcagtttctatgcctagtatctgtaagcgaaaaaaggtttggctcatagagaaaaagaaagatacaccaaaacaacatggaacgtgtcccaaaggatggctatattttaactataagtgccttctgctgaatatccccaaagacccaagcagttggaagaactggacgcatgcccaacatttctgtgctgaagaaggggggaccctggtcgccattgaaagtgaggtggagcaagctttcattactatgaatctttttggccagaccaccagtgtgtggataggtttacaaaatgatgattatgaaacatggctaaatggaaaacctgtggtatattctaactggtctccatttgatataataaatattccaagtcacaataccactgaagttcagaaacacattcctctctgtgccttactctcaagtaatcctaattttcatttcactggaaaatggtattttgaagactgtggaaaggaaggctatgggtttgtttgtgaaaaaatgcaagatacttctggacacggtgtaaatacatctgatatgtatccaatgcccaataccttagaatatggaaacagaacttacaaaataattaatgcaaatatgacttggtatgcagcaataaaaacctgcctgatgcacaaagcacaactggtcagcatcacagaccagtatcaccagtccttcctcactgttgtcctcaaccggctaggatatgcccactggattggactgttcaccacagataatggtcttaattttgactggtctgatggcaccaaatcttctttcactttttggaaagatgaggagtcctccctccttggtgattgcgtttttgccgacagcaacggacgctggcatagcacagcctgcgagtcatttctgcaaggtgccatttgtcatgtgccacctgaaacaagacaatctgaacacccagagttgtgctcagaaacatctattccctggataaaatttaaaagtaattgctacagtttttctacagtcctagacagtatgagttttgaggctgctcatgaattttgcaaaaaggaaggttctaatcttttaacaatcaaggatgaggctgaaaatgcatttctcctagaagagctgtttgcttttggttcttctgtccagatggtttggttgaatgctcaatttgatggtaacagtaagtgatttgggtagaggagaggacataaataaatacatggttgttaaagctgatgataatggcatctgtgagccagaaaactctccttggatacgttttctgagaaaaaatagcatgaagcctaaagccatttcttccaaaaacaacattgcaacccttttctttacccttttgtcttttaaaataatcccagaacaccaaaaataaaaacaaacaataacatgtttatctttacccttagcaggaagatgcttggctggaactttgtgttcacagacttagtcattgcataccaaaaccatatttactggaaaatatcccaggtttctaaatgttataaaagcacaatagagttatggaaatgtttccatgatgaactgtgctgttaggattcttatttgctactcataaaaaccagagtttgtaataaaatggaagcatggtattcttttctttatgtaattgatggttattgaaaggtacttgtgaagaaaattattttaattggtatggagagcttgttacagtggtgtaccaaggttgggggtgagcctaccctttcgaggaggagtattttaatcaccaacattgtttagaatttccaagcagatggtgataataaaaagcagaccaacttttagttagctgtattgttagttttaaattattttcagacaatacactattgcccacacatgggatggactctcctaccgcccctacccccttggtacatggctggcttggtattaaagaaattcactgtaaaatctttttagaaagtgagccattttgtaatgatgaagatgttaggacttcaaaggatttttctttactcggattagttttgtttatcaaatgatttctttaaatcgattatatatatatatggaatatttcaaaattcaaactgtcacattaagaaacatgataacctaaatgacctaaataagaacactgtacctaaaataaagaggcaactttaaaaaaaaaaa

SEQ ID NO: 335 - DNA, 2125 bp, Homo sapiens
  misc_feature: Incyte ID No: 1989707CB1
gccgtgggacgggcgggtagcggcaacctttggggagcagagtggtccccaacgcccaggtgccccggctcgcgctctggcccgggcgaatcgggctataggaagggccacacggatggaagtcctagtccgggtgctcacctcttgtggaacgtgcaaagcctgtcccaggacctctttacactctgggggtctctgcccaggcacgcttgctgcttccggacacagctgtgggcggagctagtaggggcggggctacgtgattgacacttctctcctcagacttcaagggctaccactggacccttcccctgtcttgaaccctgagccggcaccatgcacggacgcctgaaggtgaagacgtcagaagagcaggcggaggccaaaaggctagagcgagagcagaagctgaagctataccagtcagccacccaggccgtattccagaagcgccaggctggtgagctggatgagtccgtgctggaactgacaagccagattctgggagccaaccctgattttgccaccctctggaactgccgacgagaggtgctccagcagctggagactcagaagtctcctgaagagttggctgctctggtgaaggcagaactgggcttcctggagagctgcctgcgggtgaaccccaagtcttatggtacctggcaccaccgatgctggctgctaggccgcctgcctgagcccaactggacccgagagctggagctctgtgcccgtttcctggaggtggatgagcggaactttcactgctgggactatcggcggtttgtggccacacaggcagccgtgccccctgcagaagagctagccttcactgacagcctcatcacccgaaacttctccaactactcttcctggcattaccgctcctgtctcttgccccagctgcacccccagccggattctggaccacaggggcgcctccctgaggatgtgctgctcaaagagctggagctggtgcagaatgccttcttcactgaccccaatgaccagagtgcctggttttatcaccgttggctcctaggccgagctgacccccaggatgcactgcgctgcctgcatgtgagccgggacgaggcctgtctgactgtctccttctctcggcccctcttagtgggctccaggatggagatcttgctgctcatggttgatgattctcccctgattgtggagtggaggaccccagatggcaggaaccggcccagccatgtctggctctgtgacctgcctgctgcctccctcaacgaccagttgccccaacatacatttcgcgtcatttggacagcaggcgatgtccagaaagaatgcgtgcttttaaaaggccgccaggagggctggtgccgggactccacgacagacgagcagctattcaggtgtgagctgtcagtggagaagtccacagtgctgcagtctgagctggaatcctgtaaggagctgcaggagctggagcctgagaataaatggtgcctgcttaccatcatcctgctgatgcgggcactggaccccctgctgtatgagaaggagaccctgcagtacttccagaccctcaaggccgtggaccccatgcgggcaacgtatctggatgacctgcgcagcaagttcttgctggagaatagcgtgctcaagatggagtatgccgaggtgcgtgtgctgcacctggctcacaaggatctgacagtgctctgccatctggaacagctgctcttggtcacccatcttgacttgtcacacaatcgcctccgaaccctgccacctgcactggctgccctgcgctgccttgaggtgctgcaggccagtgataatgccatagagtccctggacggcgtcaccaacctaccccggctgcaggagctgctactgtgcaacaaccgcctccagcagcctgcagtgctccagcctcttgcctcctgccccaggctggtcctcctcaacctgcagggtaacccgctgtgccaagcggtgggcatcttggagcaactggctgaactgctgccttcagttagcagcgtcctcacctaagaggccctgccccctacccttgccctttaacttattgggactgaataaagaatggagaggccctctcaggctaccaaaaaaaaaa

SEQ ID NO: 336 - DNA, 2040 bp, Homo sapiens
  misc_feature: Incyte ID No: 3110662CB1
ctgacgtcaaggcgacatcgcaaacctcgcccagattcaggcgtgtaaaccagccggagcggcgcggcagcggcaggaccgccgtggcgcctagagtagcgacccggggggagcgcggggcgacgctggctgcagggacccggtgacagcgtgagaggttcgcagagtactaggttttgacaagcttgcatcatgcgtgagtataagctagtcgttcttggctcaggaggcgttggaaagtctgctttgactgtacaatttgttcaaggaatttttgtagaaaaatacgatcctacgatagaagattcttatagaaagcaagttgaagtagatgcacaacagtgtatgcttgaaatcttggatactgcaggaacggagcaatttacagcaatgagggatttatacatgaaaaatggacaaggatttgcattagtttattccatcacagcacagtccacatttaacgatttacaagacctgagagaacagattcttcgagttaaagacactgatgatgttccaatgattcttgttggtaataagtgtgacttggaagatgaaagagttgtagggaaggaacaaggtcaaaatctagcaagacaatggaacaactgtgcattcttagaatcttctgcaaaatcaaaaataaatgttaatgagatcttttatgacctagtgcggcaaattaacagaaaaactccagtgcctgggaaggctcgcaaaaagtcatcatgtcagctgctttaatatactaaatgcattgtagctctgagccaggtctgaagaactgttgcccaattcaacagtgccagcattccaactttgttaaacctaccaacatcttaaatggactttcctgtggtggtaccctttaagaggcggatgaaagctactatatcagtttgcacattctaatcactttccagtatcacaagagagatttttacttatataatagtcctagagtttgcagctggtaaaaccagaggctacatccagtattactgctaagagacattcttcatccaccaatgttgtacatgtatgaaaatggtgtactgtatactttaacatgccccatactttgtattggagagtacaataatgtaaatcctaaaagcaccactattttagcataataaaagaaagtccaaagagctcctatatagactactccagataacttcgcttctttgatacttgtagcttattgtaattttttttaagaaattcaaggtcattattattgtacaaaataagcgctttgattaacacagctatatagtttttttaatttttaaaaaacctgtggagacggtgatcttgtctttaaaacatgatagtcctttcagtataatgtcttagattaaagacgttgcctttaatatctgttgggaaggaaatgtccagacttttcaaatctcttattatatgtttcctttttttgtttacatagggaacaatgtttatagtcgtgtgtacagtgggggtctacaacaagaagtgtatattttcaaacaattttttaatgatttaacaatttttgtaaatcattttcaggcttctgcagctgtagattctcactgtgaatcccttgcttgctcatgcataagtgtatttgcaataccaaatatacaggtttagtatttttgcctgttagtgattgtttcacatgtgtaacgttttggttgagatgttaaatggtggacgagtactgtggatgtgaatgtgggaagtaattttaatcatatgtaattggtcacaaggcctaatttgcagtaactattgctgttttatttaacaatgccttgttgctttgtatgcattaatgtttggatgtaaagattgtgtgtctatccaacagggagccacagtatttaaattgaccaacctaatgttacaactactttgaggtggccaaatgtaaactaaaagccttaattaaagtggtgcaattttgtataacttagcatcagtagttcaataaatttggattgccatgcaagggcttgcattataattacttgccacaaaaaaaaa

SEQ ID NO: 337 - DNA, 4537 bp, Homo sapiens
  misc_feature: Incyte ID No: 287029.18
ggcatttgcaaccatctgctctgtattccctcccctgtgcctcttacccagcagatgtcagcacatgtggacgccacacagcagggactctgctctttcgttcagttcactgacatatccccaggacctaaacagtgcttgacatatagtagatacccagtaaatatgtggtgagtgaaataatttttcatagaaagtctggaaggacatatactagtattttaaaatcccctctggggttatgaacatggatgatgaatgtattctttttgcatagctgtattttataattttcttcataatgatgtgtttatgtcatgccaattgtataaacatgatcttatatatttgtaattttttttctccctcccagataggagcatgctgctatgtggaatgttcagctttaacccagaagggattgaagactgtttttgatgaggctatcatagccattttaactccaaagaaacacactgtaaaaaaaagaataggatcaagatgtataaactgttgtttaattacgtgagaaacatcttcagtggccaaggaaactgtccatttctctcagaaagcaaatgaaatgctacagctatacccagaccttttataggtaatgaagcagttcaaaacttgaaagaaaacaaaacctgtcctcagaattctataaagtgtattaagaatgttccttaaaggtttaagaagcagtaagcagcatctgaagccacaatctattataaatactttatttcaactagaaggtacaatctctcaggggtttcatagtttaaaaagctacaatcacatcatgttgtaactacgtaaaaaacagagctgtaaatggaactgcttggctttgaccatacacatttctgcccagcccttacagaatctgcacaaagaaatatctccctttgctccagttaattgttcttgtatgtaagttgctttctattccagtatatccagagtggtgaaataacaaggccagccacgtagccaaaggtcgctccaagcgtacaggagatgggccatacctgaggagagaatgtatgagatcaaaaaagaacaaatgttttattattacttgagcacaagtgtaacctaaatatttctatattaaagcttaatgtgctttcttaaagaatgccaaaagtgtaataaggtcataactgcatttatcatgaacactaaaaatgtacacattttagttaatgtgcattaaactgtaacaaggcttctggcaattgtagatttagtttgacgctccccaaagtgcatgagacacatgctaaaattacaaattaaaattttgggtcagactttgccataatgatagactcaatttagctctctgaactagttggtaattttttttttttaattcccactttggctgtgtacatcaaatgaaatgagaagtgtgtatgctgaccaaaccacaagaaactttctttaagttgtgttaaagaggaaagacctagaatccaagcgtgttacatgaaaattgtaacagagcagctgcttccacctttcagatatagatgttggaaccacagcagaagttatagagcgacaacttatatacacacctagaatgtaagttaaacaaaataccggcttccagagaccccttttctccagccatattacatcaggctagaagtaattaatgttgatttatttcatctacaagcagttggtccctaagtgaaaggctctgcttgaaaaaaaaaagaaaaaaaagttggaggaaaattttcatgttcttctgtgaagcttatttggtacactggagccatttctaatctttctctggggggaacaggccacagaactgtgttagaggtgaaccatcttaattactagttctattacctaattcagcttccttgtttggtctgctgtggatctgccttattgcatatgccatgcatcagataatggatgcatcagataatggtgttagacaaagcttcattgtgaacaacctaatgcattttagagaaacaatctcatcacattttttctagcctttcctacatttaaacttgctgttgcccaaattataattttttaaatgtctttggtgggcttctgttaattcacatgacttgagcttatagctatgtctactgcacagattgggtaatggaacactaaacttttatacttgaaaatgacagccttaaatgctcatatcagtcacaaatctaggatgtactgtcttgttgtatgtgagctttgtagagatttttaaaaatataagcatcaccttcccattgaagagtggagagagtctactggatgactggccaggaactttctctctgaatcggacatttggatgtcttctttcttccaagaaatggtggttcacattaaagtatcatggccttatgtatgctcaaatggaatcttatgtaactttcttatttaattttggtctgcttatttttagataaaattgaaaggaattgtataaatcaattaacatattagctgagttgtccaacacatggtataaacgaattacaacagtaaactattacacatttccaacttgcctttggggatttatgaggattttttttggtggggggagggggctccaattcatatctctgaaacccttcacacttggtttactaattcaaagttagaagtctagaatttgccctgccctaacagaaacagattaggaatttgtctacacaaactggtgtcacctgtttcttgactgggatttggtttcctcattataaatatgggaggtagaacagagatctccaacgtctctcccatttatcacagtaattttcttattcacagtaatcattgttggatgttaccttttcagcttcacattctcaagatggtaaaaatcatgtatatagattatcagaactctaagcaaagatgactgtcacatctgaagctgaggtgccttaggtactctactgaccttgatgggtttggagttccccattgcttatcaagagctttttaattgctttggttctttagtttttctttttgcaaaaatccttcctgtcactttaactaaaaaccaaagatttgttttctattgataagcagactagagaaaaactgccttattttcagaagcatgtcttcattcaaagcttaggcttcaatagaaattcagactaatcactgaaatgactatttcaaactagtgaaatatctgggaaataaactgcttcaaaaatattttactgacatgaattttgctagtgaatacaaatacactgcctcaaataaggccatgtatgaatgaacttacaagatatttgagttaatcagtgtttgcatatagagaattagttctaaagttcttaaaaataaatttaggggctccctgaaattttatttaatactttgctaacttacactcttgttttatctccacaggtacattttaggttagctcatggtgaattctatttacaataagtggagcttggattaatgggttttgttatgaattatcttagtgactttagacactgtttccatttgatttttaactatttaaaataccaaattaaataccagtttgttggttgttacttttaaatgattgttactttaacagtgtcccttcttaacacatggggttacaaataaaatactatgcatagtttactatctacgtaaagcactgaactttttaccttagtagtttttatttattaccctatgtaaacatttaggataatactctttcctctatttatgctgagagtctactaatcattggcaaagtatgagtccctatactctgttaaaaaaagctcactgttaaagtatagggagaatagtaatccctcatgaatcccagctagattccaatttgggttactaaattgtattttaatcattttgtaatttcagtatggctctttgttctcaaacacatacataccaccacgcacattcttttaaacagctgccacacctcacctccaacagaatgccaaaaatgaaatgttaaaaaattttgtctaatgaagggttacggcttggaacacttggttattcatgttatgtaaatcaagaagtgcatgccatcagcaaattaaaatgtggactggctttgaagactgttaatgatgggtcaggctttgtacttacaagagtacctccttggctttcctgaaataagcatttcttaatcgtaaccctgtcatttttttaaaagagaatttctttaagggccgttttcatgatttttgaagatcaaaatagattatcaaaatagggaacagcaaaaggagggaggctgcccactaagaactattcctcaagcaagtttcctactgattttcttataattattctaaaaatttttaaactacactatggcaacagaattcatttgtaaatcctagcttaatcaggtattttcataattagatcctaaggttttcctttaaaactatttccttatctcacatacagacatgtttctattcaacgttcttcatgccacaaataggattttttaaaaaag

SEQ ID NO: 338 - DNA, 1847 bp, Homo sapiens
  misc_feature: Incyte ID No: 344297.3
tctagagccgccgcctgccgggtctggagcgcgccgtccgccgcggacaagaccctggcctcacgccggagcagccccatcatgccgagggagcgcagggagcgggatgcgaaggagcgggacaccatgaaggaggacggcggcgcggagttctcggctcgctccaggaagaggaaggcaaacgtgaccgttttttgcaggatccagatgaagaaatggccaaaatcgacaggacggcgatggaccagtgtgggagccagacttgggagaatgatgcagtctgtgcaggcccctgctccctgatccccacacctgacaaagaagatgatgaccgggtttacccaaactcaacgtgcaagcctcggattattgcaccatccagaggctccccgctgcctgtactgagctgggcaaatagagaggaagtctggaaaatcatgttaaacaaggaaaagacatacttaagggatcagcactttcttgagcaacaccctcttctgcagccaaaaatgcgagcaattcttctggattggttaatggaggtgtgtgaagtctataaacttcacagggagaccttttacttggcacaagatttctttgaccggtatatggcgacacaagaaaatgttgtaaaaactcttttacagcttattgggatttcatctttatttattgcagccaaacttgaggaaatctatcctccaaagttgcaccagtttgcgtatgtgacagatggagcttgttcaggagatgaaattctcaccatggaattaatgattatgaaggcccttaagtggcgtttaagtcccctgactattgtgtcctggctgaatgtatacatgcaggttgcatatctaaatgacttacatgaagtgctactgccgcagtatccccagcaaatctttatacagattgcagagctgttggatctctgtgtcctggatgttgactgccttgaatttccttatggtatacttgctgcttcggccttgtatcatttctcgtcatctgaattgatgcaaaaggtttcagggtatcagtggtgcgacatagagaactgtgtcaagtggatggttccatttgccatggttataagggagacggggagctcaaaactgaagcacttcaggggcgtcgctgatgaagatgcacacaacatacagacccacagagacagcttggatttgctggacaaagcccgagcaaagaaagccatgttgtctgaacaaaatagggcttctcctctccccagtgggctcctcaccccgccacagagcggtaagaagcagagcagcgggccggaaatggcgtgaccaccccatccttctccaccaaagacagttgcgcgcctgctccacgttctcttctgtctgttgcagcggaggcgtgcgtttgcttttacagatatctgaatggaagagtgtttcttccacaacagaagtatttctgtggatggcatcaaacagggcaaagtgttttttattgaatgcttataggttttttttaaataagtgggtcaagtacaccagccacctccagacaccagtgcgtgctcccgatgctgctatggaaggtgctacttgacctaagggactcccacaacaacaaaagcttgaagctgtggagggccacggtggcgtggctctcctcgcaggtgttctgggctccgttgtaccaagtggagcaggtggttgcgggcaagcgttgtgcagagcccatagccagctgggcagggggctgccctctccacattatcagttgacagtgtacaatgcctttgatgaactgttttgtaagtgctgctatatctatccattttttaataaagataatactgtttttgagac

SEQ ID NO: 339 - DNA, 3370 bp, Homo sapiens
  misc_feature: Incyte ID No: 346535.6
tacatacatcaattttattttaatcttacagcaatcatatgagacaaaagcttttaacacctgcactttatattcgaggaattaaagttctcagaggcgactaaagaccaaactcagggctgaggagttccaaagctgagttgagttgcaaatgaatcaccgaggaccaccggagctttctagcgaccctcgcaccagggaacgaacccctgtggtttaagggctccaacccacaacccagttcctttggcgggaaacagcaccctcccaaggccccgccccttcctggccccgccccgtcgtctctgggcccggctcctggagatgggtattattaatctgccttctatgggggacctggcccatctcgggtatcagccccgcccctactcgtccagtctccgaacgctctgcagccaatcggcgcccgagggtcggtccccgccttctcaagccccgccccctacccttatccctggcagcttccgctaaacgggctcagagccacgcggcacgcccgggcaggctttctctggctggtaaccgctactcccggacaccagaccaccgccttccgtacacaggggcccgcatcccaccctcccggacctaagagcctgggtcccctgtttccggaggtccgcttcccggcccccagattctggcatcccagccctcagtgtccaagacccaggcagcccgggtccccgcctcccggatccaggcgtccgggatctgcgccaccagaacctagcctcctgcagacctccgccatctgggggcactcaacctcctggagccaagggccccacgtcccacccagagaaactctcgtattcccagctcctagggccaaggaacccgggcgctccgaactcccagctttcggacatctggcacacggggcagagcagagaagcctcagcgcccagcctggggaatttaaacactccagcttccaagagccaaggaacttcagtgctgtgaactcacaactctaaggagccctccaaagttccagtctccaggtgctgttactcaactcagtcctaggaacgtcgggtcctgggaaggagcccaagcgctcccagccagcttccaggcgctaagaaaccccggtgcttcccatcatggtggccgatcctcctcgagactccaaggggctcgcagcggcggagcccaccgccaacgggggcctggcgctggcctccatcgaggaccaaggcgcggcagcaggcggctactgcggttcccgggaccaggtgcgccgctgccttcgagccaacctgcttgtgctgctgacagtggtggccgtggtggccggcgtggcgctgggactgggggtgtcgggggccgggggtgcgctggcgttgggcccggagcgcttgagcgccttcgtcttcccgggcgagctgctgctggtctgtgggatgatcatcttgccgctggtggtgtgcagcttgatcggcggcgccgccagcctggaccccggcgcgctcggccgtctgggcgcctgggcgctgctctttttcctggtcaccacgctgctggcgtcggcgctcggagtgggcttggcgctggctctgcagccgggcgccgcctccgccgccatcaacgcctccgtgggagccgcgggcagtgccgaaaatgcccccagcaaggaggtgctcgattcgttcctggatcttgcgagaaatatcttcccttccaacctggtgtcagcagcctttcgctcatactctaccacctatgaagagaggaatatcaccggaaccagggtgaaggtgcccgtggggcaggaggtggaggggatgaacatcctgggcttggtagtgtttgccatcgtctttggtgtggcgctgcggaagctggggcctgaaggggagctgcttatccgcttcttcaactccttcaatgaggccaccatggttctggtctcctggatcatgtggtatgcccctgtgggcatcatgttcctggtggctggcaagatcgtggagatggaggatgtgggtttactctttgcccgccttggcaagtacattctgtgctgcctgctgggtcacgccatccatgggctcctggtactgcccctcatctacttcctcttcacccgcaaaaacccctaccgcttcctgtggggcatcgtgacgccgctggccactgcctttgggacctcttccagttccgccacgctgccgctgatgatgaagtgcgtggaggagaataatggcgtggccaagcacatcagccgtttcatcctgcccatcggcgccaccgtcaacatggacggtgccgcgctcttccagtgcgtggccgcagtgttcattgcacagctcagccagcagtccttggacttcgtaaagatcatcaccatcctggtcacggccacagcgtccagcgtgggggcagcgggcatccctgctggaggtgtcctcactctggccatcatcctcgaagcagtcaacctcccggtcgaccatatctccttgatcctggctgtggactggctagtcgaccggtcctgtaccgtcctcaatgtagaaggtgacgctctgggggcaggactcctccaaaattacgtggaccgtacggagtcgagaagcacagagcctgagttgatacaagtgaagagtgagctgcccctggatccgctgccactccccactgaggaaggaaaccccctcctcaaacactatcgggggcccgcaggggatgccacggtcgcctctgagaaggaatcagtcatgtaaaccccgggagggaccttccctgccctgctgggggtgctctttggacactggattatgaggaatggataaatggatgagctagggctctgggggtctgcctgcacactctggggagccaggggccccagcaccctccaggacaggagatctgggatgcctggctgctggagtacatgtgttcacaagggttactcctcaaaacccccagttctcactcatgtccccaactcaaggctagaaaacagcaagatggagaaataatgttctgctgcgtccccaccgtgacctgcctggcctcccctgtctcagggagcaggtcacaggtcaccatggggaattctagcccccactggggggatgttacaacaccatgctggttattttggcggctgtagttgtggggggatgtgtgtgtgcacgtgtgtgtgtgtgtgtgtgtgtgtgtgttctgtgacctcctgtccccatggtacgtcccaccctgtccccagatcccctattccctccacaataacagaaacactcccagggactctggggagaggctgaggacaaatacctgctgtcactccagaggacattttttttagcaataaaattgagtgtcaactatttaa

SEQ ID NO: 340 - DNA, 580 bp, Homo sapiens
  misc_feature: Incyte ID No: 286187.5
  unsure 152, 154: a, t, c, g, or other
caaatatatcacacagacaacagccataagaaagctggagtggctattctaataccagacaaaatagacttaaaaaaatgttactggagataaagagtaaaatgttacaatgataaaagggtcaatacatcaggaagatgtaacaactatananatatatgcatctaacagtagagcccaaaatacatgaagcaaaaactgaaaggaaaggagaaacagataagtccataaaaagagttggaatattcaatacccctttttcaataatagagcacctagacagaagataaaccaggaaatagaagacttgaacaacattataaggcaaattgacctaaaagacatctatagaactttccacccaacatcagaatacatattcttctcgagtgcatatgaaacatctccaaaataggtcataagttaaagcataaaacaagccttaataaatataagtagactgaaatcatgcaaagcatgccctctgaccacatgggatgaagttagaaaacaatgaaaagttgggaaactcacaaatatgtggaaatcagacacacttgtaagtgactggctgggtgca

SEQ ID NO: 341 - DNA, 3584 bp, Homo sapiens
  misc_feature: Incyte ID No: 242380.1
  unsure 148: a, t, c, g, or other
gggacccctggagccctgccgccatcagagatcaagcatctggcatcagggatcttcggacccagcagaaggatccgccacaggggaggtgtcctcccagggaagccaacgagagattcacctgccccacatcaggagtgggcccccncttactgacgctgctggcaaccatagcaggccccttaacccctcagtctcctccccatcaccctgcctcaggccctttccccgcctccagctctcatctcaactcccagttcccagccctctaagccctagcacccccggctaccaccctaaccctccaggtcttggccatactcacccccatcctgggacatttgccagatctctgggagggagatcgtttgtttaggcgatgccccctggtggcatgacagcgtctgcctagacccctgacccctagcactcaactccctgtggcctcctttgtgtgaagagccgcccctctgcttagcagcgtgggttgggggccaaagggaaagccagccccagctgggcccccgggccccaccacttatctccttgctgggcagctccccttggcctttgggcctctccctgctcccctcggcccctcctcctgggccgcctcaatgaaggagccggcatgccactcaagctgtttgtgcggcagatcccgaggcatctggcaggagcacggacctgaatgcccatcttcgaatcagtttgcgtcgcgatctttgagctgactgtcatcaagggacaagtacagccggtgctgcacaagggatgttgccttcctgacatactgtgcccgggattcagccctgaaggcccagagctgccctgcacgaacagaagacgcttccagggatgaacaggcctgatccaggtcaaggccagccgacagcgagagccgaggagaagaccggaagctctttggtggggactggctagggaagcagcagacagatgaccggacgtccggaacgactgttttggaggcccttcggggaccatcgacgagtgcacatgtgctaccgggggcccagatggcacccagcaaagggctgcgcctttcgtgaaggttccagacccacgctgaaggcccaggcggggccatcaacacccttcacagaaagccggaccctgtccaggtgcctcgtccagcctggtggtgaagtttgctgacactgagaagggagcgaggtctccgccgcatgcagcaggtggccacccagttgggcatgttcagccccatcgccctccagtttggagcctacagcgcctacacccaggccctgaagcagcagcaggcggccctggtagcggctcacagtgcctacactcagccaccatggccaccatggctgccgtgcagatgcagcacatggctgccatcaatgccaatggcctcatcgccacccccatcaccccatcctcaggaaccagcacccctcctgccatcgctgccacgcctgtctctgccattccggctgccctgggcgtcaacggctacagcccggtgcccacccagcccactgggcagcctgcccctgatgctctgtatcccaacggggttcacccctacccagcccagagccccgcggcccccgtggactccctgcagcaggcctacgcggggatgcagcactacacagcagcctacccagcagcctacagcctggttgcacctgcgttcccgctagtcctccagccctggtcgcccagctagcccccaccaccacctcaacagcagcagcagcagcagcagcagcaacagacagcagcagcaaagagaaggccctgatggcatgcaacatcttcatcgtaccaactgccccaggagttcactgactcagagatcctccagatgtttgtcccctttggccacgtcattctcagctcaaagtctttgttgaccgagccatcaatcaaagcaaatgttcggcgtttgctgagtttcgacaatcctggccatgtgcccagggctgccatccaaggccatgaatggcttccagatcggcatgaagctccctgctaagtccatgctaacagcggcctacggatgccaagccggccctactgagggcccccaggtctggagatcccagaggaaggggcgcctcacaccctcttcccacgactggccccggccctctccgcacacctgccctgggccttgactgggttctggggcaaacgctgcttcgtggcccccgggggcacaagacaccggcccctcccacccccctgggcctctctgaagggccatggctatgcttccctggctccaagggcccatttccttccttggatggccctttgggcctttgtgagggagcgaggaacaggctcgaaggctccggggtatctgccttctgctgggctcctgtgacaggccttcttgtgcccagcgtttgttacttgccctccccccaacagtggggcctggttcttacccgtgccaggccccagtgagagccgcaggggcctgccacacactcccagctcaccctcaccccagcctcttccccacattaggggtttcttggaagctggctctcactcccctccaccctcagctagaggtaggatatccctgattcctgggctcccagccctaaaactcactgcctcccccaagggccccctctaaggagggtgtgggggagccctgagggctgcctctctgccagtcaagccacagagaccctcctcctttcacgaggaaaagaccttcccctgaacccctaaaaatgtttacagtctctgctggttccctctgtgtaaataccactaccacccgtgcgttaatcccagcccgcccggcccggccccggacgcctgcccatctctctttcctgggagtttagacaatgttgccccttggatttttttctctctcttaatttctccctttgcctttggggggtaattgggtattgggaggaggggtgtggggaggggtcaaggggtttattacctgatcattttctttaggaagaggttttagggaaaagaaaatggggtgggggtgggggtggtaaggggagaccggggagtcagtttcagacagttctctatgcttaacttatttatttattgcattttacttttaaagagttggtcttttgctgtcctaaataaagaaaaaagtttaaaagcatcaaataagagtcttggaaggttgagggtaggggattgttccctacccacactgggaaggggggagggaggtagagaatgaggtttgagagagaaaatccccatcagggaaaggccgggcccttgctatttagagcagcatccaggccttgttcatggcttcatgatcctgtccttcagcccttctttggggcttaatactggaatgtcctgacagagtatcggcacaagagagatactcccactgtacggagggctctcccctgtatccagctctgtccctctgaaggctgaggacttgcagtctcacatctggacctccatttctgcacagaggccagtgtggatactgggagccagttgtgacaccaaacatttactaaccactgctccatatgtgattctgttccaagtccttattgtgcatttcc

SEQ ID NO: 342 - DNA, 829 bp, Homo sapiens
  misc_feature: Incyte ID No: 1383559.7
gcaccattgatggttgaaacttcataattaataagttctcaggtaccttttatagctcttaagccataaagatgatttgtgtttcttttgttgaaatacaggctccctaatttttctttccctttaaaaggaattactctgcttaatgtaagcaagctgaacattttgaagcttgctcctggtgggcatgtgggacgtttctgcatttggactgaaagtgctttccggaagttagatgaattgtacggcacttggcgtaaagccgcttccctcaagagtaactacaatcttcccatgcacaagatgattaatacagatcttagcagaatcttgaaaagcccagagatccaaagagcccttcgagcaccacgcaagaagatccatcgcagagtcctaaagaagaacccactgaaaaacttgagaatcatgttgaagctaaacccatatgcaaagaccatgcgccggaacaccattcttcgccaggccaggaatcacaagctccgggtggataaggcagctgctgcagcagcggcactacaagccaaatcagatgagaaggcggcggttgcaggcaagaagcctgtggtaggtaagaaaggaaagaaggctgctgttggtgttaagaagcagaagaagcctctggtgggaaaaaaggcagcagctaccaagaaaccagcccctgaaaagaagcctgcagagaagaaacctactacagaggagaagaagcctgctgcataaactcttaaatttgattattccataaaggtcaaatcattttggacagcttcttttgaataaagacctgattatacaggcagtgagaaacatg

SEQ ID NO: 343 - DNA, 253 bp, Homo sapiens
  misc_feature: Incyte ID No: 1327456.1
ctcctaactcagttacattggcaaatttgaaatcattgatgatcacagagctgggaaaattgttgtgaacctcacaggcgggctaaacaagtgtggagtgatcagcctcagatttgatgtgcaactcaaagatctagaaaaatggcagaataatctgcttccatcctgccagtttggtttcattgcactgacaacctcggctggcatcatggaccataaggaagcaagatgaaaacacacagcagggaaaatc

SEQ ID NO: 344 - DNA, 2429 bp, Homo sapiens
  misc_feature: Incyte ID No: 1468237CB1
gcgctgcccgcccagttcctgttcccagactgaggcccagcccccttcgcccgtttccatcacgagtgccgccagcatgtctgacaaactgccctacaaagtcgccgacatcggcctggctgcctggggacgcaaggccctggacattgctgagaacgagatgccgggcctgatgcgtatgcgggagcggtactcggcctccaagccactgaagggcgcccgcatcgctggctgcctgcacatgaccgtggagacggccgtcctcattgagaccctcgtcaccctgggtgctgaggtgcagtggtccagctgcaacatcttctccacccaggaccatgcggcggctgccattgccaaggctggcattccggtgtatgcctggaagggcgaaacggacgaggagtacctgtggtgcattgagcagaccctgtacttcaaggacgggcccctcaacatgattctggacgacgggggcgacctcaccaacctcatccacaccaagtacccgcagcttctgccaggcatccgaggcatctctgaggagaccacgactggggtccacaacctctacaagatgatggccaatgggatcctcaaggtgcctgccatcaatgtcaatgactccgtcaccaagagcaagtttgacaacctctatggctgccgggagtccctcatagatggcatcaagcgggccacagatgtgatgattgccggcaaggtagcggtggtagcaggctatggtgatgtgggcaagggctgtgcccaggccctgcggggtttcggagcccgcgtcatcatcaccgagattgaccccatcaacgcactgcaggctgccatggagggctatgaggtgaccaccatggatgaggcctgtcaggagggcaacatctttgtcaccaccacaggctgtattgacatcatccttggccggcactttgagcagatgaaggatgatgccattgtgtgtaacattggacactttgacgtggagatcgatgtcaagtggctcaacgagaacgccgtggagaaggtgaacatcaagccgcaggtggaccggtatcggttgaagaatgggcgccgcatcatcctgctggccgagggtcggctggtcaacctgggttgtgccatgggccaccccagcttcgtgatgagtaactccttcaccaaccaggtgatggcgcagatcgagctgtggacccatccagacaagtaccccgttggggttcatttcctgcccaagaagctggatgaggcagtggctgaagcccacctgggcaagctgaatgtgaagttgaccaagctaactgagaagcaagcccagtacctgggcatgtcctgtgatggccccttcaagccggatcactaccgctactgagagccaggtctgcgtttcaccctccagctgctgtccttgcccaggccccacctctcctccctaagagctaatggcaccaactttgtgattggtttgtcagtgtcccccatcgactctctggggctgatcacttagtttttggcctctgctgcagccgtcatactgttccaaatgtggcagcgggaacagagtaccctcttcaagccccggtcatgatggaggtcccagccacagggaaccatgagctcagtggtcttggaacagctcactaagtcagtccttccttagcctggaagtcagtagtggagtcacaaagcccatgtgttttgccatctaggccttcacctggtctgtggacttatacctgtgtgcttggtttacaggtccagtggttcttcagcccatgacagatgagaaggggctatattgaagggcaaagaggaactgttgtttgaattttcctgagagcctggcttagtgctgggccttctcttaaacctcattacaatgaggttagtacttttagtccctgttttacaggggttagaatagactgttaaggggcaactgagaaagaacagagaagtgacagctaggggttgagaggggccagaaaaacatgaatgcaggcagatttcgtgaaatctgccaccactttataaccagatggttcctttcacaaccctgggtcaaaaagagaataatttggcctataatgttaaaagaaagcaggaaggtgggtaaataaaaatcttggtgcctggaaaaaaaaaaaaaaaaaaaaaggcggccgcccttttttttttttgttaaattagagacagggtctcactacattgcctagattggtctcaaactcctgggctcaagcaatcttcctctcttggcctcccaaagtgttgggattgcaggtgtgcgccactaggcccagcttgaaaaattttttaatgcatgtggtaatccacaggagatcacatttagtatatgaccaagttaattaagaagtcaaaaaacacgttaaatttaagcagaataaggctggttcaggtggctc

SEQ ID NO: 345 - DNA, 323 bp, Homo sapiens
  misc_feature: Incyte ID No: 1383247.1
actggcctcgatttaaagagacagaagctgtcggggtcctgggaagacggtccccaataccctccccccaagtccttgggaccacttgggtccccagagctggggagatggtttgtggcggctttgcctgctccaagaatgcgctttgcctgctcaacgtggtctacatgctggtgagcttgttgctcattggagtggctgctttgggcaagggcctggttctggtgtccagcatccacatcatcggcggagtcattgctgtgggagttttccttctccttattgcagtggctggactggtgggtgctgtcaaccaccaccaa

SEQ ID NO: 346 - DNA, 2107 bp, Homo sapiens
  misc_feature: Incyte ID No: 1095640.17
gccagagtaaagcaaagagaaaggaagcaggcccgttggaagtggttgtgacaaccccagcaatgtggagaagcctggggcttgccctggctctctgtctcctcccatcgggaggaaacagagagccaggaccaaagctccttatgtaagcaacccccagcctggagcataagagatcaagatccaatgctaaactccaatggttcagtgactgtggttgctcttcttcaagccagctgatacctgtgcatactgcaggcatctaaattagaagacctgcgagtaaaactgaagaaagaaggatattctaatatttcttatattgttgttaatcatcaaggaatctcttctcgattaaaatacacacatcttaagaataaggtttcagagcatattcctgtttatcaacaagaagaaaaccaaacagatgtctggactcttttaaatggaagcaaagatgacttcctcatatatgatagatgtggccgtcttgtatatcatcttggtttgcctttttccttcctaactttcccatatgtagaagaagccattaagattgcttactgtgaaaagaaatgtggaaactgctctctcacgactctcaaagatgaagacttttgtaaacgtgtatctttggctactgtggataaaacagttgaaactccatcgcctcattaccatcatgagcatcatcacaatcatggacatcagcaccttggcagcagtgagctttcagagaatcagcaaccaggagcaccaaatactcctactcatcctgctcctccaggccttcatcaccaccataagcacaagggtcagcataggcagggtcacccagagaaccgagatatgccagcaagtgaagatttacaagatttacaaaagaagctctgtcgaaagagatgtataaatcaattactctgtaaattgcccacagattcagagttggctcctaggagctgatgctgccattgtcgacatctgatatttgaaaaaacagggtctgcaatcacctgacagtgtaaagaaaacctcccatctttatgtagctgacagggacttcgggcagaggagaacataactgaatcttgtcagtgacgtttgcctccagctgcctgacaaataagtcagcagcttatacccacagaagccagtgccagttgacgctgaaagaatcaggcaaaaaagtgagaatgaccttcaaactaaatatttaaaataggacatactccccaatttagtctagacacaatttcatttccagcatttttataaactaccaaattagtgaaccaaaaatagaaattagatttgtgcaaacatggagaaatctactgaattggcttccagattttaaattttatgtcatagaaatattgactcaaaccatattttttatgatggagcaactgaaaggtgattgcagcttttggttaatatgtctttttttttctttttccagtgttctatttgctttaatgagaatagaaacgtaaactatgacctaggggtttctgttggataattagcagtttagaatggaggaagaacaacaaagacatgctttccatttttttctttacttatctctcaaaacaatattactttgtcttttcaatcttctacttttaactaataaaataagtggattttgtattttaagatccagaaatacttaacacgtgaatattttgctaaaaaagcatatataactattttaaatatccatttatcttttgtatatctaagactcatcctgatttttactatcacacatgaataaagcctttgtatctttctttctctaatgttgtatcatactcttctaaaacttgagtggctgtcttaaaagatataaggggaaagataatattgtctgtctctatattgcttagtaagtatttccatagtcaatgatggtttaataggtaaaccaaaccctataaacctgacctcctttatggttaatactattaagcaagaatgcagtacagaattggatacagtacggatttgtccaaataaattcaataaaaaccttaaagctgacttcgtttgttatgtaggctgtatgcatatattgaaaacagaagtgaaactttcgatt

SEQ ID NO: 347 - DNA, 2169 bp, Homo sapiens
  misc_feature: Incyte ID No: 2644884CB1
gccctccgggaagatggcggccgtgcaggcggccgaggtgaaagtggatggcagcgagccgaaactgagcaagaagtggtggtaatcattagttccagggtgctctgccatgttgacgcaagctgctgtaaggcttgttagggggtccctgcgcaaaacctcctgggcagagtggggtcacagggaactgcgactgggtcaacttgctcctttcacagcgcctcacaaggacaagtcattttctgatcaaagaagtgagctgaagagacgcctgaaagctgagaagaaagtagcagagaaggaggccaaacagaaagagctcagtgagaaacagctaagccaagccactgctgctgccaccaaccacaccactgataatggtgtgggtcctgaggaagagagcgtggacccaaatcaatactacaaaatccgcagtcaagcaattcatcagctgaaggtcaatggggaagacccatacccacacaagttccatgtagacatctcactcactgacttcatccaaaaatatagtcacctgcagcctggggatcacctgactgacatcaccttaaaggtggcaggtaggatccatgccaaaagagcttctgggggaaagctcatcttctatgatcttcgaggagagggggtgaagttgcaagtcatggccaattccagaaattataaatcagaagaagaatttattcatattaataacaaactgcgtcggggagacataattggagttcaggggaatcctggtaaaaccaagaagggtgagctgagcatcattccgtatgagatcacactgctgtctccctgtttgcatatgttacctcatcttcactttggcctcaaagacaaggaaacaaggtatcgccagagatacttggacttgatcctgaatgactttgtgaggcagaaatttatcatccgctctaagatcatcacatatataagaagtttcttagatgagctgggattcctagagattgaaactcccatgatgaacatcatcccagggggagccgtggccaagcctttcatcacttatcacaacgagctggacatgaacttatatatgagaattgctccagaactctatcataaggtaatgcttgtggttggtggcatcgaccgggtttatgaaattggacgccagttccggaatgaggggattgatttgacgcacaatcctgagttcaccacctgtgagttctacatggcctatgcagactatcacgatctcatggaaatcacggagaagatggtttcagggatggtgaagcatattacaggcagttacaaggtcacctaccacccagatggcccagagggccaagcctacgatgttgacttcaccccacccttccggcgaatcaacatggtagaagagcttgagaaagccctggggatgaagctgccagaaacgaacctctttgaaactgaagaaactcgcaaaattcttgatgatatctgtgtggcaaaagctgttgaatgccctccacctcggaccacagccaggctccttgacaagcttgttggggagttcctggaagtgacttgcatcaatcctacattcatctgtgatcacccacagataatgagccctttggctaaatggcaccgctctaaagagggtctgactgagcgctttgagctgtttgtcatgaagaaagagatatgcaatgcgtatactgagctgaatgatcccatgcggcagcggcagctttttgaagaacaggccaaggccaaggctgcaggtgatgatgaggccatgttcatagatgaaaacttctgtactgccctggaatatgggctgccccccacagctggctggggcatgggcattgatcgagtcgccatgtttctcacggactccaacaacatcaaggaagtacttctgtttcctgccatgaaacccgaagacaagaaggagaatgtagcaaccactgatacactggaaagcacaacagttggcacttctgtctagaaaataataattgcaagttgtataactcaggcgtctttgcatttctgcgaaagatcaaggtctgcaagggaattcttgtgtgctgctttccatttgacaccgcagttctgttcagccatcagaagagagacaaggaattaaaaatttctttttaatcctgttaccaaataaaaaaaaaa

SEQ ID NO: 348 - DNA, 2319 bp, Homo sapiens
  misc_feature: Incyte ID No: 005486.39
ccgccctccgccccgtgtccgcatgcgcgactgagccgggtggatggtactgctgcatccgggtgtctggaggctgtggccgttttgttttcttggctaaaatcgggggagtgaggcgggccggcgcggcgcgacaccgggctccggaaccactgcacgacggggctggactgacctgaaaaaaatgtctggatttctagagggcttgagatgctcagaatgcattgactggggggaaaagcgcaatactattgcttccattgctgctggtgtactattttttacaggctggtggattatcatagatgcagctgttatttatcccaccatgaaagatttcaaccactcataccatgcctgtggtgttatagcaaccatagccttcctaatgattaatgcagtatcgaatggacaagtccgaggtgatagttacagtgaaggttgtctgggtcaaacaggtgctcgcatttggcttttcgttggtttcatgttggcctttggatctctgattgcatctatgtggattctttttggaggttatgttgctaaagaaaaagacatagtataccctggaattgctgtatttttccagaatgccttcatcttttttggagggctggtttttaagtttggccgcactgaagacttatggcagtgaacacatctgatttcccacagcacaacagccctgcatgggtttgtttgtttttttactgctcactcccaaccttttgtaatgccattttctaaacttatttctgagtgtagtctcagcttaaagttgtgtaatactaaaatcacgagaacacctaaacaacaaccaaaaatctattgtggtatgcacttgattaacttataaaatgttagaggaaactttcacatgaataatttttgtcaaattttatcatggtataatttgtaaaaataaaaagaaattacaaaagaaattatggatttgtcaatgtaagtatttgtcatatctgaggtccaaaaccacaatgaaagtgctctgaagatttaatgtgtttattcaaatgtggtctcttctgtgtcaaatgttaaatgaaatataaacattttttagtttttaaaatattccgtggtcaaaattcttcctcactataattggtatttacttttaccaaaaattctgtgaacatgtaatgtaactggcttttgagggtctcccaaggggtgagtggacgtgttggaagagagaagcaccatggtccagccaccaggctccctgtgtcccttccatgggaaggtcttccgctgtgcctctcattccaagggcaggaagatgtgactcagccatgacacgtggttctggtgggatgcacagtcactccacatccaccattgaaggaaaggaaaaaaagggcagagacttgacactccagtcttagacaggggacaatttctttgtagttgttctgataataaactgggttccatgttgcatttcatctgtgtactgaaccactagcctaatagaccagcacggtcaactagaatgacaaacattagctactgggaactcttgttgtctcttcctcttcagaactcttgtccccccaggctccccacctctgcaagatgggatacactcttcaggaccacagtttgaaatgtctttcataaaatgtgctacaattagccttcggaatatttgctgggtgatttaaatgtgtgggtctcatttccatgctagccatggtcatctgacagtctctacgctgtgaatattgcctggtgatcaagactctcctcaaagaaatgacttgctgtcatcccacatgaactcctgatgttttttctacaaaagtccataaaatgtgaaaactggagaagatcttagaggttgaagcccaccttctcttttcacataggagggaacagaccatggaaatttaaacgacttcctcacggtcacagaactagttttttaatcctcaggcagtgcatccccccaccctacaactgagcacaacctctttccccacagtgcaattcagaatatgctcagggaatgccagccaccttgtaaaactgctgggagaaaagcatgattcccacaaggactaagtatcagtgatttgtaattttcctgttttgtattatctgctttgctgatgtagacaagagttaactgagtagcatgctttattaagcatgagaaagaatcttaagaattgtcaataaaattaacccaaaactttaataatgtgtctgtaaccaagaaaatattgatagcatcatcctaatgaaactaaacatttattttaaacttattaaattgactcttaaactaaaaaa

SEQ ID NO: 349 - DNA, 5757 bp, Homo sapiens
  misc_feature: Incyte ID No: 6169813CB1
agcatcatttaaccttttaaatgaaaaagattaagatctcatgcaactgttgtattttctggaagccattctccaaaagggaagtgcacatttaaaacacagatatgatggtccttgctgcagggatttaagtctacttgcttttacatcatgaccagcttgaaacggtcacagacagaaaggcctcttgccactgacagggcctctgttgttggcacagacggcacccccaaagtccacactgatgatttctacatgcggcgcttccggtcccaaaatggcagcttaggatcatcagttatggctcctgtaggacccccccgaagtgaaggttctcaccatataacctcaacccccggagtcccaaaaatgggggtaagggcaaggattgcagattggcccccaagaaaggaaaacataaaagaatctagccgttcaagccaggaaatagaaacctcaagttgccttgatagcctgtcctccaaaagcagtcctgtgagtcagggaagttctgttagcctcaattccaatgactcagccatgctgaaaagcatacagaacacgctgaaaaacaagacaagaccgtcggagaacatggactccagatttctcatgcctgaagcctaccccagctcccccagaaaagctcttcgcagaatacgccagcgaagcaacagtgatatcaccataagtgaacttgatgtggatagctttgatgaatgtatctcacctacatacaagactggaccatcactgcacagggaatatggtagcacatcttcaattgataaacagggaacatctggagaaagcttttttgatttgttaaagggctacaaagatgacaaatctgatcgaggtccaactccaaccaagctcagtgactttctcattactggtggtggcaagggttctggtttctctttggatgtaatagacgggcctatctcacagagagagaacctcaggctttttaaggaaagggaaaaaccactcaagcgacgttcaaaatctgaaactggagactcctctatttttcgtaaattgcgcaatgccaaaggtgaagaacttgggaagtcatcagatcttgaagataaccgatcagaagactctgtcaggccctggacatgtccaaagtgctttgcccactatgatgtccagagtatattatttgatttgaatgaggcaattatgaacaggcacaatgttattaagaggagaaacaccaccactggagcttccgcagctgccgtggcatccttggtctctggacctctgtctcattcagccagttttagctccccaatgggcagcacagaggacctgaattccaaaggaagcctcagcatggaccagggagatgataaaagcaatgagcttgtaatgagctgtccatattttcggaatgagataggtggagaaggggagaggaaaatcagcctttcaaaatcaaattctggctcctttagtggatgtgaaagtgcctcctttgagtctacccttagttcccattgcacaaatgcaggagtggcagtacttgaagtgcccaaggagaacttggtgttgcacctagatagagtgaaaagatacatcgtggaacacgtagatctgggtgcatactattatagaaaatttttctaccagaaggaacactggaactattttggggctgatgagaatcttggtccagtggctgtgagcattcgaagggaaaaaccagatgaaatgaaagaaaatggatctccgtacaactaccgaataatttttagaactagtgagctcatgacactgagaggttcggtcctggaggacgccattccgtcgacagccaagcactcgacagccagaggcctgcctctcaaagaagtgctggagcacgtggttcctgagctcaatgtccagtgcctgcggttggccttcaacacacccaaggtcacagagcagctcatgaaactggatgaacaagggctgaactaccagcagaaagtaggcatcatgtactgcaaagctggacagagcactgaagaagagatgtacaacaatgagtcagctggcccagcctttgaagaattccttcaactattgggagagcgagttcggctcaaaggatttgagaagtatcgagcacagcttgataccaaaactgactccactggaacccattctctgtacacaacatacaaagattatgaaattatgttccatgtttctaccatgctgccatacacacccaacaacaaacaacagctcctgaggaagcggcacattggaaatgatatcgtaacaattgttttccaagagcctggagcacagccattcagcccaaaaaacatccgatcccacttccagcacgttttcgtcatcgtcagggtgcacaatccgtgctctgacagtgtctgttatagtgtggctgttaccaggtccagagatgtgccttcctttgggcctcccattcctaaaggggtcactttccctaagtcaaatgtgttcagggacttccttttggcgaaagtgattaatgcagaaaatgctgctcataaatcggagaagtttcgggccatggcaactcggacccgccaggaatacctgaaagatctggcagaaaagaatgtcaccaacacccctatcgacccttctggcaagtttccgttcatctctctggcttccaagaagaaggaaaagtctaagccatatccaggagccgagctcagcagcatgggggccattgtatgggcagtccgggctgaagactacaacaaggccatggaactagactgccttttagggatctccaatgagttcattgtgctcattgaacaggaaacaaagagcgtggtcttcaattgttcctgtagagatgtgatagggtggacttcaactgacaccagcctcaaaatcttctatgaacgaggagaatgtgtttcagtgggtagttttattaacattgaggagatcaaagagattgtcaaaaggttgcagtttgtttcaaaaggctgtgaatcggtggagatgactctgcgaagaaatgggctaggacagcttggcttccatgtcaactatgagggcattgtggcggatgtggagccctacggttatgcctggcaggcagggctgaggcagggcagtcgcctggtggagatctgcaaggtggcggtagccactctgagccatgagcagatgatcgacctcctgagaacatctgtcacggtgaaggttgtcatcattcccccgcatgatgactgcaccccgcggaggagttgctctgaaacctaccgcatgccagtgatggagtacaaaatgaatgaaggtgtttcatacgaattcaagtttcccttccgaaataataacaagtggcagaggaacgccagcaaggggcctcattcacctcaagtcccgtcccaggtgcagagtcccatgacctcgcggctgaatgctggaaaaggagatgggaagatgcctcctccagaaagagccgccaacatccctcgaagcatctccagtgacgggcgcccactagagaggcggctgtctcctggttcggacatctatgtgacggtctcatccatggctttagcaagatcccagtgtcggaactctcctagcaacttgtcttcatccagtgatactggttctgtggggggcacttacaggcagaagtccatgcccgaagggtttggagtgagccgtagatccccagcctccattgacaggcagaacacccagtcagatattggtggcagcggaaaatccacgcctagctggcaaagaagtgaggatagcattgctgaccagatggagccaacatgccatctcccagcagtatcaaaggtactgccagctttccgagagagccccagtgggagattaatgcggcaggatccagtggttcatttgtctccaaacaaacaagggcattctgatagccactactcgagccactccagtagcaatactctctccagcaatgcgtcaagtgcccatagtgatgagaagtggtacgatggggaccgcacagaatccgaactcaacagctataactatctgcaaggcacctctgctgacagtggcattgacaccacctcttatggccccagccacggcagcacagcctcgctgggggctgccacatcgtcacctcgctcagggccaggcaaggagaaagtggcacccctatggcacagctccagtgaagtaatctccatggcagatcggactttggagacagagagccacggcctggaccggaaaacagagtcttccctgagcttagacatacacagcaagagccaagccggctcgacccctctgacaagggagaacagcaccttcagtataaacgatgctgcttcccacacaagtaccatgagctcccgacactctgccagcccagtggttttcaccagtgcccggagttcacctaaagaagagcttcatccagctgccccctcacagctcgcaccatccttctcctcctcttcctcctcctcctctggtcctaggagtttttaccctcgccagggcgctactagcaagtacctgattggatggaaaaaacccgaaggaaccataaactccgtgggatttatggacacgagaaagcgtcatcagagcgatggcaatgaaatagcccacaccaggctgcgtgcctcaaccagagacctccgggcatctcctaagccaacctccaagtccaccattgaagaagatctaaagaaactaattgatcttgaaagcccaactcctgaatcacagaagagttttaagttccacgcactctcctctcctcagtctcctttccccagcacccccacctcacggcgggccttgcacagaacactgtcggacgagagcatttacaatagccagagggagcactttttcacctccagggcgtcacttctggaccaagccctgcccaacgacgtcctcttcagtagcacgtacccttctctccccaagtcgctcccgttgaggaggccttcttacaccttaggaatgaaatcgctgcatggagagttctcagcctcggacagctccctcactgacatccaggagacccgcaggcagcctatgcccgaccctggcctgatgcccctgcctgacactgctgcagacttggattggtccaacctggtagatgctgccaaagcctatgaggtccagagagcctcattttttgctgctagtgatgaaaaccatcgccccttgagtgctgcatccaacagtgatcagctggaggaccaggctctggcccagatgaagccttacagcagcagtaaagactcctctcccactctggcttctaaagtggaccagctggaaggtatgctgaagatgcttcgggaagatttgaagaaggaaaaagaagacaaagctcaccttcaggcggaggtgcagcacctgcgagaggacaacctgaggctacaggaggagtcccagaacgcctcggacaagctgaagaagttcacagaatgggtcttcaacaccatagacatgagctagggaaggctgaggaggacaggagaagggcccagacactccctccagtgagtgtcctgcagcccttattccctccatagaaagcatcctcagagcaccttccctggcttcctactctgccccctttcggggagtgcacaacacaatagttgcagatcaacaatcatcacctgccttttgtagaaaagaaaaacaaaaaaagtaaataaaaattttaaacagtaaaataaaagtttaactgctaaaaaaaaaaaaaaa

SEQ ID NO: 350 - DNA, 2939 bp, Homo sapiens
  misc_feature: Incyte ID No: 233668.45
ccgacgggggctgcgcgggggctgtggctccgggactgcggagaacatattgtgatgttcgtgcctcagagctaaaactatgagtgaatttcggattcaccatgacgtcaatgaactgcttagcctgctgcgtgtccacggaggagatggggctgaggtctacattgacctgcttcaaaagaacaggaccccgtacgtcactaccactgtctctgctcacagtgccaaggttaaaattgcagagttttctcgtactccagaagactttctaaagaaatatgatgaactgaaatctaaaaatacaaggaaccttgacccgctggtgtacctgttgtcaaagctcacggaagacaaagagactctgcagtacttacaacagaatgcaaaagaaagagctgagcttgcagccgctgctgtgggcagcagtaccaccagcatcaacgtccctgccgcggcctccaagatctccatgcaggagcttgaggaactgaggaagcagcttggcagcgtggccacaggctccacactgcagcagtctctggaacttaaaagaaagatgcttcgagacaagcagaacaaaaaaaattcaggccagcacctccccatcttcccagcatgggtgtatgagagacctgccctgatcggggatttcctgattggtgctggcatcagcacagacaccgctttgccgataggcacgttgcccctggcctcgcaggagtcggccgtggtggaggacctgctgtacgtgctggtgggcgtggacgggaggtacgtcagtgctcagcccctggctgggaggcagagccggaccttcctcgtggaccccaacctggacctgtccatcagggagctggtgcacaggatcctcccagtggccgccagctactccgctgtgaccaggttcattgaagagaagtcttccttcgagtacgggcaggtgaaccacgccctggcggccgccatgcgcaccctggtgaaggagcacctgattctggtgtcacagctggagcagctgcacaggcagggcctcctttcgctgcagaagctctggttctacatccagccagccatgcgcaccatggacatcctggcctccctcgccacctcggtggacaaaggcgaatgtcttggggggtccacgctgagcctgctccacgacaggagcttcagctacacaggggacagccaggcgcaggagctatgcctgtacctaaccaaggcggccagtgctccctacttcgaggttctggagaagtggatctacaggggcatcatccacgacccatacagtgagtttatggtcgaggagcacgagctgcggaaggagaggatccaggaggattacaacgacaagtactgggaccagcggtacaccatcgtccagcagcagatcccgtccttcctgcagaaaatggcggacaagatcctcagcacaggaaaatatctaaatgtggtcagagagtgtggccatgacgtcacctgcccggtggctaaagagatcatctacacgttaaaagagcgggcgtatgtggagcagatcgagaaggcgtttaactacgccagcaaggtgctgctggacttcctgatggaggagaaggagctggtggctcacctcaggtccatcaagcgctacttcctcatggaccagggcgacttcttcgtgcacttcatggacctcgcggaggaggagctccggaagccggtggaggacatcacgccccctcgcctggaagcgctcctggagctggcgctgcgcatgagcacggccaacactgaccccttcaaggacgacctcaagatcgacctgatgccccatgacctcatcactcagctcttgcgcgtcctggccatcgagaccaagcaggagaaggcgatggcgcacgccgaccccacggagctggcgctgagcggcctggaggccttctctttcgactacatcgtcaagtggcccctttcgctcatcatcaacaggaaagccctcactcgctaccagatgctcttcaggcacatgttctattgcaagcacgtggagcggcagctctgcagcgtctggatcagcaacaaaaccgccaagcagcactcgctgcactccgcccagtggtttgctggggctttcactctgcggcagcgaatgctcaacttcgtccagaatattcaatactacatgatgttcgaagtgatggaaccgacctggcacatcctggagaaaaacctgaaatccgcctccaacattgacgacgtccttggccaccacacaggcttcctgggacacctgcctgaaggactgcatgctcaccaaccccgagctgctgaaggtcttctccaagctcatgtctgtgtgcgtcatgttcaccaactgcatgcagaaatttacacagagcatgaaattagatggcgagctgggcgggcagacgctggagcacagcaccgtcctggggctgcccgcaggggccgaggagcgggcccggaaggagctcgccaggaagcacctggctgagcacgcagacactgtgcagctggtgtccggcttcgaggccaccatcaacaagtttgacaagaacttctcagcccacctgctggacctcctggcccggctgagcatctatagcaccagtgactgtgagcacagcatggccagcgtcctctccaggcttgacttcaatggtttctacacggagcgcctggagcgcctgtctgcagagaggagccagaaggccaccccccaagtgcctgtcctgcgggggcccccggctcctgcacccagggtcgcagtcaccgcacagtgagccctggctgtgacaggaaggaagggtgtggggtcagcagggactggtgcaaatgggtccagaattttcaaatcgaatgctctgtgttctgtctttgcagtttaaatataaagcaggaatgattgactcagctcactttgtttctcaagg

SEQ ID NO: 351 - DNA, 5008 bp, Homo sapiens
  misc_feature: Incyte ID No: 474543.6
  unsure 147, 334, 337, 459, 1664: a, t, c, g, or other
catgcgccgggagcggccggagctgggggacgcggagggccgactgcgcctgcgcgtgacggtcagtggatcggtgggtttatctcaaggcctgagtagcccggcaacaaacgagggctcccgggattggacccgacgcagccatcncctctgcgacttgatatcaaaaagaaagctaactgctagatctgatcgagttaagagtgtggactctgcatcctacagagccatggatgttggcaaagtctttacaatggcagtgtgtgtgtttggaatcatgaaaccacagacactggtgaagacatttgaacgtcactgtgatccttcccctggngtntccgaagttgcaaagtttgttgcaatggaagaattgggttgtgacaggagcggatgacatgcagattagagtgttcaattacaatactcttggaggagagttcatatgtttggaagcacacntccagactacattccgctgtattgctgttcatccaaacccagcctttcattcctaactagcagtgatgacatgccttattaagctctgggactgggataaaacaatggtcttgctcacaaggtgtttgaaggacacaccccattatgttatgcagattgtgatcaaaccccaagataacaatcagttggaccagtgcctgcgttggacaggactatcaaggtctgtcagttgggctcttcgtcaccaaacttcactttggaaggacatgagaaaggcgtgaattgcattgattactacagtggtggggacaagccatacctcatttcaggtgcagatgatccgtcttgttaaaatatgggattatcagaataaaacatgtgtgcagacactggaaggacatgcccaaaatgtgtcttgtgccagctttcatcctgagttgccaatcattatcacaggttcagaagatggaacagtacggcatttggcattcaagcacctaccggcattgagagcacactgaattatggaatggagagggtatggtgccgtggccagtctaagagggtcaaacaatgtcgctttgggctatgatgaagggagcatcattgttaagcttggtcgggaggaacctgccatgtccatggatgccaatggaaagataatttgggccaagcattcaggaagtccagcaggccaaccttaaaagcaatgggagatgctgaaattaaagatggtgaaagattgccactggcagtaaaggatatgggcagttgtgaaatataccctcagactattcagcacaatcctaatgggcggtttgtggtggtgtgtggtgatggggagtatatcatcctacacagcaatggcattgagaaacaagagctttggatctgctcaggagtttgcatgggcccacgattcttcagagtatgcaataagagagagcaacagcattgtaaagatatttaagaactttaaggaaaaaaaatcatttaaaccagattttggagcagaaagtatctacggcggcttcttattgggagtgcagatctgtaaatggcttagccttctatgactgggacaatacagacttcatacgaagaattgaaattcagcccaaacatattttctggtctgactctggagagctagtctggtattgctactgtaggaatcattttgttatccttaagtatctgtctangaaaaagtcttggctgcacaggaaaacacattggaagggagttatctgaagtatggctattgaagatgcctttgaggttcttggtgagattccaggaaaattggttgaaaacagggctttgggtaaggcgattgcttcatttacacaagttctgtgaacagattaaattattatgttggaggagaaatagtcaccattgcccacttggacaggacgatgtatctcctaaggctaacattcctaaagacaacaggctttaatctggggggataaagaattgaacatcattagctattccctgctggtttcagtcctggaataccagacagctgtcatgcggagggactttagcatggctgataaggtccttcctaccattccaaaagaacagaggaccagagttgcacacttttttggaaaagcaggggttcaagcagcaagctcttacagtatccacagatcctgagcatcgttttgagcttgctcttcagcttggagagttaaaaattgcataccagttagcagtggaagcagagtcagaacagaagtggaaacaacttgctgaacttgcccattagtaaatgtcagtttgggcctagcccaggagtgcctgcattcatgcacaggattatggggggcctgctgctttttggccactgccccttggaaatgctaatatggtgaacaagctagcagagggtgcggagagagatggcaaaaataatgtggcattcatgagctaactttttacaggggcaaggttgatgcctgcctaagagctcttaattagaactggacggctgccagaagctgccttcttggcccgaacttacttaccccgttccgggtttccaggggtagggaaactcttggagagagaattttctcaaaagttcaattcagaaagcagcagaatcccttgctgacccaacagagtatgaaaaacctgttcccctggattaaaagaagcctttgttgttgaagaatgggtgaaggaaacacatgctgattctgtgggccagcccaaacaatacccacttgtccacgccaaattgaagagagaaatgtcatggaagaggggaaaagactttcagccctacaagatctacagctcaacaggaacttgatgggaaaccctgcttctcctactcccggttattgtggcctcccacaccagccccaccaagaagataaagagtgttactccgagacttagaagtagatttggataaatttgggaattaggaagataattgaccaccaccagatatccatctggatgaagataattttggatgattgcactgtaatagctttcccatttaccctgacttaaccagatccattattataatattaaggtattgagttgttacgctgactcactagtgtctattggacttatggagaaactttcttagaatattttgataatagtgaaatagctgtggacccatcgggagccacaatagccccacatccatcttaagaagagtttatgtggcagcaatttaaaatcactggtgttttccttggttaactaaaacagacatgggctttgatttttttccatactattagaccatatctcataaaacccttttgaattaatgaaggtacttgtttcctttctcaataatgaaaataggcttctagttttagaaggctgagccgaaactacaccttgcctagggatcagccccactgtcttttctttgtataactaaatctgcattttcaaatgttgtcaatcacatttttcttagagctgaatatccaggctgtaattctctaaaccctttttcttgacctcattgcatcattccacaggtcttgccccgattttgtctagcagctacccatttctggagtcaggatgtgaaacctctggtcctctgagcctcattaagctgggggtctgtctaagttaacgtttgccctatttggtaacacaaaaacacaccagactttttaaccgtacgctcatctaacatgatttgcgaaattcataaccaggcactcaaatatccttgtagcctacgaaaagtgagtagggtaataatttttgctttgtagggagaactacaaattgatatcttttaatctagccatctttctaacatttagctcaatattcaccgcagaaatgcagccagcatctcgcaaacataaatccattctttaaaatactctctttaggaagctgcagacatgccgactgcgtgcttctctgcaccagtctccagtgttagttctacataggctccctttccgtgcttctgtttttgcaaagaccctgattaaatttatttccctcagcagcctgatccttggccccttgagccgactggccatctggatggagcacgtgatacagctggaccaagttggttgcatcatcgattaaatctctctgaatctgggtcaatcagcaaaccattcaatctttttattatttacaaaataccacaccatttccaccaaagtatcttgttgaacgtaaaaggtcatattttcccacgttttatctatatcttcataggtcttgtgatgaaccttgatatactctgtggaatctggctcaaactgggcaaagcagagattgaggacatcaacatgcctgtcctggctatacatagtcctaagattttcttccttgaaaattattgggtgtcaaaaatgtttacgaccttcttttgggaaataaacttgtatcattcggtcccgttcttcccaagaggctttgccgtagtgtgccacttggttctctgacggacaataaaacgctcccggtgtggtatgctatatgatatatcagtaaacacatatttggttgtttcgtgttcctgtccaaaatcttgatctgtcacgctaacacatcatttattggtactcgctcttccaagaactggtggcatttttaaatcgtactttagctgcccaacctgccttgccttgagcccccttcccaaattttgccctgagtcattagcttaataggttggtggcttcagttcttgtatagctggcttaaaagtgcttctgcaagttcaaagcctgtcattttccgtgagtatagcggtgaactgtcctgcatccataaatgtaaggtttcttgggtctctgggctaccagattctgcggcctcggagctgtaccggctgtcgtggcagcccccatctcgaaagaagcaaggtagcggttgggagcaggccacctgtggccagggctggattcgagcaccaggaaacagaccccgttccacgtcccggagaactcctcaagaggctccacagcaatacagttgttccgaggggcgcccatgattatcagaagccacttgc

SEQ ID NO: 352 - DNA, 1891 bp, Homo sapiens
  misc_feature: Incyte ID No: 2972880CB1
ttttccagcccggccttcgcccgcccgctagcacgcagtcccttggtctcttcggtctcctgccgcccccgggaagcgcgctgcgctgccgaggcgagctaagcgcccgctcgccatggggagccccgcacatcggcccgcgctgctgctgctgctgccgcctctgctgctgctgctgctgcgcgtcccgcccagccgcagcttcccaggatcgggagactcaccactagaagacgatgaagtcgggtattcacaccctagatataaagataccccgtggtgctcccccatcaaggtgaagtatggggatgtgtactgcagggcccctcaaggaggatactacaaaacagccctgggaaccaggtgcgacattcgctgccagaagggctacgagctgcatggctcttccctactgatctgccagtcaaacaaacgatggtctgacaaggtcatctgcaaacaaaagcgatgtcctacccttgccatgccagcaaatggagggtttaagtgtgtagatggtgcctactttaactcccggtgtgagtattattgttcaccaggatacacgttgaaaggggagcggaccgtcacatgtatggacaacaaggcctggagcggccggccagcctcctgtgtggatatggaacctcctagaatcaagtgcccaagtgtgaaggaacgcattgcagaacccaacaaactgacagtccgggtgccctgggagacacccgaaggaagagacacagcagatggaattcttactgatgtcattctaaaaggcctccccccaggctccaactttccagaaggagaccacaagatccagtacacagtctatgacagagctgagaataagggcacttgcaaatttcgagttaaagtaagagtcaaacgctgtggcaaactcaatgccccagagaatggttacatgaagtgctccagcgacggtgataattatggagccacctgtgagttctcctgcatcggcggctatgagctccagggtagccctgcccgagtatgtcaatccaacctggcttggtctggcacggagcccacctgtgcagccatgaacgtcaatgtgggtgtcagaacggcagctgcacttctggatcagttttatgagaaaaggagactcctcattgtgtccacacccacagcccgaaacctcctttaccggctccagctaggaatgctgcagcaagcacagtgtggccttgatcttcgacacatcaccgtggtggagctggtgggtgtgttcccgactctcattggcaggataggagcaaagattatgcctccagccctagcgctgcagctcaggctgttgctgcgaatcccactctactccttcagtatggtgctagtggataagcatggcatggacaaagagcgctatgtctccctggtgatgcctgtggccctgttcaacctgattgacacttttcccttgagaaaagaagagatggtcctacaagccgaaatgagccagacctgtaacacctgacatgatggttcctctcttggcaattcctcttcattgtctacatagtgacatgcacacgggaaagccttaaaaatatccttgatgtacagattttatttgtaattttaaaagtctattttattatgagctttctttgcacttaaaaattagcatgctgctttttgtacttggaagtgtttcaaaaaattatatgaccatatttactctttctaactttctttactccatcatggctggttgattttgtagagaaattagaacccataaccatacacaggctatcaacatgttattcaatgtgacacctaactcttttctattttgttttttaagtaagacttttattaataaaacaaaatgttttggagcaaaaaaaaaaaaaaa

SEQ ID NO: 353 - DNA, 5510 bp, Homo sapiens
  misc_feature: Incyte ID No: 410335.38
  unsure 5427, 5437-5439: a, t, c, g, or other
gcggccgccagcggatttgccacccagagcataaccttcggtggcaggacaaatcaggccagcacgcagtctgccaagtcctgctcgctccctgtcaagaaaaacagctggatccatttctaatcaacacttcccaacgcaacacttctgagtctctgaaggagaccagagcttgaaactttccagacttccaacagacatcgagtgcaaaaggatatttaggttgtctttgcacaaatctggttgatttgagagataaagggggggggaaccagtgtgactttcacctaagaagtcacatgaacatatttcacatttgaactacataatgaatgatggttattgaaatagcccaaacctctaccacagagcgagggatatagctcaaggggcaaccaggcagtcgcagaaccaaggaatggatgactacaagtatcaggacaattatgggggctatgctcccagtgatggctattaccgcggcaatgagtccaacccagaagaagatgcacagagtgatgtcaccgaaggccatgatgaggaagacgagatctatgagggcgagtaccagggtatccctcacccagatgatgtcaaggccaagcaggccaagatggcgccctccagaatggacagccttcggggccagacagacctgatggctgagaggctggaagatgaggagcagttggcccaccagtacgagaccatcatggatgagtgtggccatggccgcttccagtggatcctctttttcgtcttgggtttggccctgatggccgatggggtggaagtgttcgtggtgagttttgccctgcccagtgcagagaaggacatgtgtctgtccagttccaaaaaaggaatgctagggatgatagtctacttgggaatgatggcgggcgccttcatcctgggaggcctggctgataagctgggaaggaagcgagtcctcagcatgtctctggccgtcaatgcctccttcgcctccctctcttccttcgtgcagggatatggagccttcctcttctgccgactcatctcaggcatcggtattgggggtgctctaccgattgtttttgcctatttttctgaattcttgtctcgggagaagcgaggagaacacctcagttggctgggcatcttctggatgactgggggcctgtacgcatctgccatggcctggagcatcatcccacactatggctggggcttcagcatggggaccaattaccacttccatagctggagagtgtttgtcatcgtctgtgctctgccctgcaccgtgtccatggtggccctgaagttcatgccagagagcccaaggtttctgctagagatgggcaaacatgatgaagcctggatgattctcaagcaagtccatgacaccaacatgagagctaaggggaccccagagaaagtgttcacggtttccaacatcaaaactcccaagcaaatggatgaattcattgagatccaaagttcaacaggaacctggtaccagcgctggctggtcagattcaagaccattttcaagcaggtctgggataatgccctgtactgtgtgatggggccctacagaatgaatacactgattctggccgtggtttggtttgccatggcattcagttactatggactgacagtttggtttcctgatatgatccgctattttcaagatgaagaatacaagtctaaaatgaaggtgttttttggtgagcatgtgtacggcgccacaatcaacttcacgatggaaaatcagatccaccaacattggaaacttgtgaatgataagttcacaagaatgtactttaaacatgtactctttgaggacacattctttgacgagtgctattttgaagacgtaacatcaacagatacctacttcaaaaattgtaccattgaatcaaccatcttttacaacacagacctctacgagcacaagttcatcaactgtcggtttatcaactccaccttcctggagcagaaggagggctgccacatggacttggagcaagataatgacttcctgatttacctcgtcagcttcctgggcagcctgtctgtcttacccgggaacatcatttctgccctgctcatggatagaattggaaggctcaagatgattggtggctccatgctaatctctgcagtctgctgcttcttcctgttttttggcaacagtgagtctgcaatgatcggctggcagtgcctgttctgtgggacaagcattgcagcctggaatgctctggatgtgatcacagtggagctgtatcccaccaaccagagagcaacagccttcggcattctcaatggattatgcaaatttggcgccatcctgggaaacaccatctttgcttcttttgttgggataaccaaagtggtccccatccttctggctgctgcttctctggttgggggtggcctgattgcccttcgactgccagagactcgagaacaggtcctgatgtgaacaacctatgggaaaaggaaaggtcgagagaatcttgtccaggacactgaaatgcatccacacttcctgcctatcacggtccggaggacaccttggatagcacgggaggagaagttgactttgtgacccctagtttaggacccacttcgctgtcaatatgtttgtaactcaggtgactgatttgggggtgccctgagccacccttagaatcacagagctgcgtgtttaacttcaagtcttcccagtccaaggcagggagaggattctccagtgagtgcacacactatgcgaggagcaagcatttctctaagtcaagtgcaaggacttaacttgcgtttgaaaaggaattagagggtcagaaacacccaggttcctccagaaagctccttggagcccaacaacttaacaaatcaacttggctggaagttagagtcattatatgaagattgggcttgaagtatatatttttgcatttaaaagtatcacctatcatattttccactcgaaaattgacatagtagcattgaggatactctgatctagaaagccaagtatttgagcaacatctatagagatctacttttctcctgtgtctcctaggctttccatgataattaggtaatacatttaagaaggatatttatttctgttttgctctattcaaagaaacggaatgggatagttattctgtaaactaagtttgtatataactttatttgggtttaatttccacaactggtatctgcaaatattgccagcattttagccagtattttgggagaacttggtgtttgaggtcccaggaaatgaggtctgatcaaatgaaatgcaagcacaatttcttacagccatttaactttctgttgggaggatgaattaacaaactcacattgtgcagtccgcttaatccaggcacttttctttgtgcaggtgtagtgagtagttacttctctcccttacacagatgacttgtgaaactcaagctcaccatcttcagtgctggcattttactttgccactacccaaaaacaatgtgagatgtgttcagtggcctctggtactctttgcaggcaagaatcaaacaacatggggactgagggaaggatggggaagtgtagccacagttcttccaaatgtaaatactttttgtttgttctagtggtaaaatgcaaatgcaatccatatttgttaggatggtcaggtctcatgagaaatctatgctatgtgtccagagcttttgaaacagagtccattggagtgggagttagggagtgtagtggatgccaaatatgtttttcttcagtgcttaagagaactgtttcctgaagtccagctttgaacataaacaggggtgtgggttgggggaggagcttaggacaaacctctctgatgaaggtcagcaatagactgaagtcttgactgcatggaagaggaaaaacatcagaactgtctgacaatggaggggacagtgagctacgcacaactgccagcggaggtgaacttgcacctgcccaggccggatgaacatcagcctgcaagaactagttgtttgagttgatttgcagtgctctcaatgggcaagtgccacattttccctggcagagatctccaaaaatttaaaacagaataataatggctatatcgagtgttttctcagtattggagaaatgcttaggtcctatgatagcttcgggacatctttctgtaattttcctcaattaacgggttggtaggggtaaatcttatgacacctttccaccgtcgatttgagatcagttttaatggttaaaatgtttactctccttctgtcaaccctcacctttttatttacacccctccctttttttctgtacagggagagaagacatattgactctgactggacaccctgattcctccaaatatatataccactgtgtattaatctttctctcagtgttttataggagtactaacatttattgctctgtcaatgatgaaaggctcgatgtaatatagctgtaatttactttccatatgaatacagtggctaggttcataaaagagaattgtgtgagtctgggattaccacatctaaaacattattctttaatgggataatacaattcattgagcagctaccacttaaaaaacttgcaggacagttagagcctgcatttctagttaagatggatcttgtaaatttaaaattggattaacattggagtgctggggtggctgcaataatttgggggctaactccatttggtttccaagatctcacttctgcattatctttatggctctttaaaccagccacctagccaatcaagggcaattcccatctcatccatcactcaggtctttgtaaagggtgcagccaagctctgcagacttttgcaggattgtctagcctgagtaccgggctacttcttaaatgccgtcactcctgctgagataaatgcgtctttaaaaatagtctctgtggcaggtcactgggggacaatgtacagcattctggccatccacttctttttcacttcatgttctaccccaagagactcccgatgtcggctgtggagggttaaagggatgaggctttcctttgtttagcaaatctgttcacagttcttgatgatgtattttatgatgcccagcttggaaatagttgctttccatagtctcaactgtattgtgtcatctcctgatgctgatttttgatcttttgttttattaaaaataattagtgaaagaggtgtgcctatctgtgaagtttgtagtacatcatcctgaggtcatgtaacaagtaaaccccaacccagcgttccctcctacgttgtgttagttcattaaaactaaataataaaacataacgtgtaagaaaacccttaaggggactggggttagagattattttcaggcactaaggtctcttctgtattccaaaattgattgaatcagctgggagaaacatttgngacatcgctnnntccttcaactttttaattttgcaacatggggaccttgagaggttaaacgatgtggcccaggttacatgtaa

SEQ ID NO: 354 - DNA, 5271 bp, Homo sapiens
  misc_feature: Incyte ID No: 221500.1
  unsure 1086, 1089, 1773-2110: a, t, c, g, or other
cgaggaccattcggaagaaggcggagctacctctcatcaggaccagtctgactgcacctgcatccttagctcagagcatccccggagcatcttaagagctgagcgcagctgacaactaggggccggaccgtcgcaggaggcgtccgctggataccttcccccttccctgacctagagctctacagctgctgcctcggtactgaccgagggttcccagagctgtcttaccattgcaaaaacgttatagcaacagcctctgattacgacatggctgagatcaccaatatccgacctagctttgatgtgtcaccggtggtggccggcctcatcggggcctctgtgctggtggtgtgtgtctcggtgaccgtctttgtctggtcatgctgccaccagcaggcagagaagaagcacaagaacccaccatacaagtttattcacatgctcaaaggcatcagcatatacccagagaccctcagcaacaagaagaaaatcatcaaagtgcggagagacaaagatggtcctgggagggaaggtggacgtaggaacctgttggtggacgcagcagaggctggcctgctaagccgagacaaagatcccagggggcctagctctggatcttgtatagaccaattacccatcaaaatggactatggggaagaactaaggagccctattacaagcctgacccctggggagagcaaaaccacctctccatcatctccagaggaggatgtcatgctaggatccctcaccttctcagtggactataacttcccgaaaaaagccctggtggtgacaatccaggaggcccacgggctgccagtgatggatgaccagacccagggatctgacccctacatcaaaatgaccatccttcctgacaaacggcatcgggtgaagaccagagtgctgcggaagaccctggaccctgtgtttgacgagaccttcaccttctatggcatcccctacagccagctgcaggacctggtgctgcacttccttgtcctcagctttgaccgcttctctcgggatgatgtcattggcgaggtcatggtgccactggcaggggtggaccccagcacaggnaangtacaactgaccagggacatcatcaaaaggaatatccagaagtgcatcagcagaggggagctccaggtgtctctgtcatatcagcctgtggcacagagaatgacagtggtggtcctcaaagccagacacttgccgaagatggatatcaccggtctctcaggtaatccttatgtcaaggtgaacgtctactacggcagaaagcgcattgccaagaagaaaacccatgtgaagaagtgcactttgaaccccatcttcaatgaatctttcatctacgacatccccactgacctcctgcctgatatcagcatcgagttcctcgttatcgacttcgatcgcaccaccaagaatgaggtggtggggaggctgatcctgggggcacacagtgtcacagccagtggtgctgaacactggagagaggtctgcgagagcccccgcaagcctgtggccaagtggcacagtctgagcgagtactaatcctgttcttctctcctctaatccccgggggccaagctggggagggatgtggaggggaaaaagatgacagagaagtggactccaaacctcattttagttgtagaagaaaatttcttacaaaacaaattccacaaagaacaccctatatgaccacagctgcagatcagttcttagcaatgatgtttttttttctgctttgcaaggcgctannnnnnnnnnnnnnnnnnnnnnnnnnnnnnnnnnnnnnnnnnnnnnnnnnnnnnnnnnnnnnnnnnnnnnnnnnnnnnnnnnnnnnnnnnnnnnnnnnnnnnnnnnnnnnnnnnnnnnnnnnnnnnnnnnnnnnnnnnnnnnnnnnnnnnnnnnnnnnnnnnnnnnnnnnnnnnnnnnnnnnnnnnnnnnnnnnnnnnnnnnnnnnnnnnnnnnnnnnnnnnnnnnnnnnnnnnnnnnnnnnnnnnnnnnnnnnnnnnnnnnnnnnnnnnnnnnnnnnnnnnnnnnnnnnnnnnnnnnnnnnnnnnnnnnnnnnnnnnnnnnnnnnnnnnnnnnnnnnaatgggggacaaaagagagggaaagacccctataaatctatatataacaatgtaaccatatacttgcatgtctaatacaaactgaagaaattagcctaactgccaatatcaagttgcagattttaatccatggaaattgtgttttgtgctgaattgtatttgctgattacctgaaattggcttctttttattgggcttctctggagaatttctcccactccccacctctgcagaagaaaattttgctcttataaaacctcatgttttcatcattcccatcttttctttttattgcctcttatatctctgctctttgacctcaaggtctagaggtctgcagtaagccaagaaacaaaggtggggtggatgaggcaaggtttgcaggagaaagaggaattgagaaatggggtatttttgctatcagctcttctgctatgaagtagtaaaaggcagtctataattaactgacagacctaactgaagcacagagaatacatcagacttatgcatccaagacatcagaacttggattttatcaaacttgatgacttctctaaaaggagctttggaaacttcaaattcagctataggatagtaccaatgaacacatccagctgatcccaaaagctgttttcaggtataaggacaaggagaggagacaagtgacgacagccattcccctttgcagctatctactgtagtgacagccatttcttggttgatgggttggaagtcatcagaggtttgaagaattacactggcctttgtttttctggaaatgccgaccatggagatgctttagagtcttctcaaatagcttagatgttgtaatgaggttagctttgcttcataaaacaggggccctcagaagttctccttaaatttttcaataaaaatttagctcttaaaaaaataacagtgtgactgagtgaatgaagataagttggattctttcagagcattcttttcctcaaaacgagctgcataattcttggaatttatgtcttaccacatggtggagggatggaggaactacaggatgcaattcttcttctaccaatgggcaatagaggttgagagagattcagcatctttctgggattagaattcaagtctctttactcctacagcagctgtgtctccaacgttgagactttgcagatggcacagactccatggataataggtaaacttggggccgggcgcaggggctcagcctgtaatcccagtattttgggaggccgaggtggaaagatcgcttgagcccaggagttcaagaccagcctgggctacatgacgaaactccatctctatcaaaaatacaaaaaattaactaagtgtggtgctgcacgcctgtggtcccagctattcaggaggctgaggtgggaggatcatttgagcccagaggtagaggctgcagtgagccatgatcatgccactgcactctgggctgggtaacagagtgagatcctgtctcaaaaattaattaattaattaattaaaataaactaggtaaacttggataggcagtagatatttttgcccacctgaggaggaactcagtcaagctgttgcttaacagcttgatccagggcgtgaaaggttagttgagactgaagtgttcacttccatagaagaacatcacttttaaccttgctttggcgaagggagtcggaaagctgagtctctatggacgggggggtgatcttgctttcagtgttccctcagcttttgtggatttaaaaccattctgctccccctaaaccttttgtttgatttcagcccatgttcttgacaatgcagagcaattctgagcagtcacaaagcctactctctgttcttgtccctgccaacccccaccccccataatctgactcacaacttcaccatcagttggggtcataccactagtctctgtcctataccccatgaaatgtaaatactgtatcataagtagaagaaaataatttttgttttctaaaaatgcattttgagatagtttaatgtaaatctgacaggagcattctgaagccccattaggaaaaaatttaaatggttcctcttcatcgccttaatgtctaaagatcagaaatcgctgagcaaacccgcttttgtttccttcccagaaacaatgcaaaacaacaggtggagatagtctggtctttgccctgctgtgtgtgcctctgtagctcctcctgacaaacgtctgggaaaacagcctcaccccactctcctctctcttccccatttccttgtagctttattccttgcatctttgggtctactgagcagtgggtgctgaggtgacaggggaggaaccagttgttctgtagcctaggaactgcctcagtgtctttgccagaaaaaggcaaagaggcggacagtgcagggctcctccctcctacctcaggcctgatccatcgtgcccttgactttgccgtctcaaagtttcttagctgactttggctttcacatttgttctttccagagctaactgataagagtggaggaggaatgccttctcctaagagtcagttgaaagaaagacaagagagtcacatcttagcttttgcacaaggcattcgtggtcaggaataggttagggaatggtcacttctgattttccaacagttgctccttctctgaagagatcttgattcctttgggaagacaagaatttttcttaataacaaaggtccctttatgagttattccttctttcagttcatctcactggagcacagccaagatggacatgtttatggacagtgctctagatgtgaaaacagatagaactggtttgtgggacaggggcagcttgctcaggagagggaataacgcaggtcccttttcttggaaggcttgtactatggccatgacagtgacattgccctcaccatgatccctctccaaagtggttgtctttctttaccttgtgtcttctcttgtaaaaatgaaactcaaaaataaaataaatgtgtcaaattttgaaaaaaaaagaaaactgaaaaagctaacatgaattgtgtgaaattgcataatgctgtaatgctaatctacaatatgtaatgctatcttgtatgttgaatttgttaatgcaccacacaagtgcaaaataaagactgattcacattacattagggcaaaaaaaaaaaaaaaaa

SEQ ID NO: 355 - DNA, 1748 bp, Homo sapiens
  misc_feature: Incyte ID No: 204244CB1
cggcggcttcagtgctcggggaggaggcagtgacggccggtgagattggaagtggcggcggcggcaggcggcagaggggagtccgaggttatgcgtctcaatgatcccgcggaaacgctacgggtctaagaacacggatcagggtgtctacctgggtctctcaaagacacaggtcctgtcccctgcaactgctggcagtagcagcagcgacatcgcccctctgccccccccagtgaccctcgtccctccccctcccgacaccatgtcctgccgggatcggacccaggagtttctgtctgcctgcaagtcgctgcagacccgtcagaatggaatccagacaaataagccagctttgcgtgctgtccgacaacgcagtgaattcaccctcatggccaagcgcattgggaaagaccttagcaacacatttgccaagctggagaagctgacaatcttggcaaagcgcaagtccctctttgatgataaagcagtggaaattgaagagctaacatatatcatcaaacaggacatcaatagcctcaacaaacaaattgctcagctccaggatttcgtgagggccaagggcagccagagtggccggcacctgcagacccactccaacaccattgtggtctccttgcagtcgaaactggcttctatgtccaatgacttcaaatcggttttagaagtgaggacagagaacctgaagcagcagaggagccggagagagcagttctcccgggcacctgtgtcagccctgccccttgcccctaaccacctgggcggtggtgctgtggttctgggggcagagtcccatgcctccaaggatgtcgccatcgacatgatggactctcggaccagccagcagctgcagctcattgacgagcaggattcctacatccagagtcgggcagacaccatgcagaacattgagtcgacaattgttgagttgggctccatctttcagcagttggcacacatggttaaggaacaggaggaaaccattcagaggatcgacgagaacgtgctaggagcccagctggacgttgaggccgcccattcagagatcctcaagtacttccagtctgtcacctccaaccggtggctcatggtcaaaatcttcctcatcctcattgtcttcttcatcatctttgtggtcttccttgcttgaaccctctctactctgaggcactctgttggggtttgggaccctcctgggaaggcaagtggccagtgctgccactgagcctgtgcagggtacttgggagaaaggccctgtttccctggaactgctaagaatgaccactgcccctgatcccccaccccttgcctctggccaccctgtcctccccccaccaccctcaggcctatgaaacacacagggttctagatttgaactctgctgtgaagtgactggaagggagcagaggccagctgggggccagtgggggaggttgtttccactaggagatttttataaaccctctccagcctctcccaaaggaagcgttggcagcaaagggagatgatgcccttacccaccttcctgtgagtgaagagaggaagcagccccagggaccaattttcccaattgacctctttcttcctctttcaccatgtgaggcagggagccctgagcccttcagctgcctgcacaacccctgacattggctgctggtgactcaatctgccaaatgtgctgcagctcgttttctcccaattacagcaagactgtcagcctcaaaaaaaaa

SEQ ID NO: 356 - DNA, 2994 bp, Homo sapiens
  misc_feature: Incyte ID No: 1330229.14
  unsure 2785, 2788: a, t, c, g, or other
cggtgttagaagcgctggtaggccttggagaggcgggttaggaagacgcagggccccttggcctagcttcgatcgttcgaattcagagcacgtccttccgaggtgaaggaacgcgaaactccacccatccgattgctgttcggctgcgggcgggtcctttggtcgggctgaccctgggtgagcggcccggagccaagactcgagagtggagactgctgcacggactctggaaccatgaacatatttgatcgaaagatcaactttgatgcgcttttaaaattttctcatataaccccgtcaacgcagcagcacctgaagaaggtctatgcaagttttgccctttgtatgtttgtggcggctgcaggggcctatgtccatatggtcactcatttcattcaggctggcctgctgtctgccttgggctccctgatattgatgatttggctgatggcaacacctcatagccatgaaactgaacagaaaagactgggacttcttgctggatttgcattccttacaggagttggcctgggccctgccctggagttttgtattgctgtcaaccccagcatccttcccactgctttcatgggcacggcaatgatctttacctgcttcaccctcagtgcactctatgccaggcgccgtagctacctctttctgggaggtatcttgatgtcagccctgagcttgttgcttttgtcttccctggggaatgttttctttggatccatttggcttttccaggcaaacctgtatgtgggactggtggtcatgtgtggcttcgtcctttttgatactcaactcattattgaaaaggccgaacatggagatcaagattatatctggcactgcattgatctcttcttagatttcattactgtcttcagaaaactcatgatgatcctggccatgaatgaaaaggataagaagaaagagaagaaatgaagtgaccatccagcctttcccaattagacttcctctccttccacccctcatttcctttttgcacacattacaggtggtgtgttctgtgataatgaaaagcatcagaaaagcttttgtactttgtggtttcctctattttgaattttttgatcaaaaaactgattagcagaatatagtttggagtttggcttcatcttcctggggttcccctcactcccttttttgtcaaccccatctgtagcctcttcctctactcaggcagtcgacccgccacgatgagaagtgggaccagcagagggcgccaacttcaggagtccgctttcccaccaggcttcattcacccagtggacctgaactgtttggtagagccacccggcccttccttcctcattgttgtttggtatgcgcacagttcctgtgggactgggccgtgagttttccattggaaagaagttcagtggtcccattgttaactcagcctcaaatctcaactgtcaggccctacaaagaaaatggagagcctcttctggtggatgctttgctccctctgagctgcccatgctggtctggcaaacacacctttctgctttgccttcacaaaagtaatgtgttccctttcccaccccttgcctgaccctcagggagtcagcctgcttccatccatgggtgggaagacttcagcacaaaggaaagactaattcttgtcaggcatttttgaaaaggctgattatgtgtatcaaggtacagcatcgtagggttcccctaaacttgccctgtttttgtttttttagtttgttatccccttactgagcggcctctactaggtggctgtgattaaatgtcccaagcaaggatagggaaggggaatggttgagcctctggagatcattgtaaccaatcctgccagacctgtttggggcagtggggagcaaacctagataaggacctgtttggggcagcagggagcaaaatctcctttaacaaccaagcagttcctcattcacatcaacagagcgaggctgtgataacttaggaggcagcaatcctaatagtccttcagtgcattttagtctgtctccaactggacaccagtaggtagtgtcaagccagagattcggggcagtagataaatgttcattttactgatgcactttagtttttggtctgttacctgttttccagaaatttgtggccttttaggcgggagttaggcgaccaaaccagtgagagccccaatccctgcagttttgtggcttcaagtgtgggtggacagtcctaatggggatctccagctccttccctgtgggctgccacagacagctacccccagaagggtcaatgttgggagtggttgtggctctgagctgctctacagagcttcagtgtgagaggatcgagccattgaaagctcattaccagtaggacataatttttggctctccctattcacaaccagtgcacagtttgacacagtggcctcaggttcacagtgcaccatgtcactgtgctatcctacgaaatcatttgtttctaagttgtgtttattcctggagtgacatgccaccccgaatggctcactttcactgaggatgctgtcctctgatttagctgctgcctccagcctctggcttgagaacttactaaaggcacttccttcctgttaaacccctgttaactctccataaatttggtgattctctgctaggcctaagattttgagttaacatctcttgaagccaaactccaccttctgtgcttttttgcttgggataatggagtttttctttagaaacagtgccaagaatgacaagatattaaaaaaaaaaaaaaagaaaanganaaaaaaaaaaacacctacttttaaagaaaatacctaacagatttttaatatagttatctctaccactttcttttctagtttcttgattttcagctcaggctgcattctaactcatactgtgaagacaaaggtgtttttgattcagaaatatatgaaatctgcatagtcttaatttgtaaaaaataaagaaaattccttaaccttta

SEQ ID NO: 357 - DNA, 4530 bp, Homo sapiens
  misc_feature: Incyte ID No: 364726.12
cgggtcggcaccccggcggttgggctgcgggtcagagcactgtccggtggtgcccaggaggagtaggagcaggagcagaagcagaagcggggtccggagctgcgcgcctacgcgggacctgtgtccgaaatgccggtgcgaggagaccgcgggtttccaccccggcgggagctgtcaggttggctccgtgccccaggcatggaagagctgatatgggaacagtacactgtgaccctacaaaaggattccaaaagaggatttggaattgcagtgtccggaggcagagacaacccccactttgaaaatggagaaacgtcaattgtcatttctgatgtgctcccgggtgggcctgctgatgggctgctccaagaaaatgacagagtggtcatggtcaatggcacccccatggaggatgtgcttcattcgtttgcagttcagcagctcagaaaaagtgggaaggtcgctgctattgtggtcaagaggccccggaaggtccaggtggccgcacttcaggccagccctcccctggatcaggatgaccgggcttttgaggtgatggacgagtttgatggcagaagtttccggagtggctacagcgagaggagccggctgaacagccatggggggcgcagccgcagctgggaggacagcccggaaagggggcgtccccatgagcgggcccggagccgggagcgggacctcagccgggaccggagccgtggccggagcctggagcggggcctggaccaagaccatgcgcgcacccgagaccgcagccgtggccggagcctggagcggggcctggaccacgactttgggccatcccgggaccgggaccgtgaccgcagccgcggccggagcattgaccaggactacgagcgagcctatcaccgggcctacgacccagactacgagcgggcctacagcccggagtacaggcgcggggcccgccacgatgcccgctctcggggaccccgaagccgcagccgcgagcacccgcactcacggagccccagccccgagcctagggggcggccggggcccatcggggtcctcctgatgaaaagcagagcgaacgaagagtatggtctccggcttgggagtcagatcttcgtaaaggaaatgacccgaacgggtctggcaactaaagatggcaaccttcacgaaggagacataattctcaagatcaatgggactgtaactgagaacatgtctttaacggatgctcgaaaattgatagaaaagtcaagaggaaaactacagctagtggtgttgagagacagccagcagaccctcatcaacatcccgtcattaaatgacagtgactcagaaatagaagatatttcagaaatagagtcaaaccgatcattttctccagaggagagacgtcatcagtattctgattatgattatcattcctcaagtgagaagctgaaggaaaggccaagttccagagaggacacgccgagcagattgtccaggatgggtgcgacacccactccctttaagtccacaggggatattgcaggcacagttgtcccagagaccaacaaggaacccagataccaagaggaccccccagctcctcaaccaaaagcagccccgagaacttttcttcgtcctagtcctgaagatgaagcaatatatggccctaataccaaaatggtaaggttcaagaagggagacagcgtgggcctccggttggctggtggcaatgatgtcgggatatttgttgctggcattcaagaagggacctcggcggagcaggagggccttcaagaaggagaccagattctgaaggtgaacacacaggatttcagaggattagtgcgggaggatgccgttctctacctgttagaaatccctaaaggtgaaatggtgaccattttagctcagagccgagccgatgtgtatagagacatcctggcttgtggcagaggggattcgttttttataagaagccactttgaatgtgagaaggaaactccacagagcctggccttcaccagaggggaggtcttccgagtggtagacacactgtatgacggcaagctgggcaactggctggctgtgaggattgggaacgagttggagaaaggcttaatccccaacaagagcagagctgaacaaatggccagtgttcaaaatgcccagagagacaacgctggggaccgggcagatttctggagaatgcgtggccagaggtctggggtgaagaagaacctgaggaaaagtcgggaagacctcacagctgttgtgtctgtcagcaccaagttcccagcttatgagagggttttgctgcgagaagctggtttcaagagacctgtggtcttattcggccccatagctgatatagcaatggaaaaattggctaatgagttacctgactggtttcaaactgctaaaacggaaccaaaagatgcaggatctgagaaatccactggagtggtccggttaaataccgtgaggcaaattattgaacaggataagcatgcactactggatgtgactccgaaagctgtggacctgttgaattacacccagtggttcccaattgtgatttttttcaacccagactccagacaaggtgtcaaaaccatgagacaaaggttaaatccaacgtccaacaaaagttctcgaaagttatttgatcaagccaacaagcttaaaaaaacgtgtgcacacctttttacagctacaatcaacctaaattcagccaatgatagctggtttggcagcttaaaggacactattcagcatcagcaaggagaagcggtttgggtctctgaaggaaagatggaagggatggatgatgaccccgaagaccgcatgtcctacttaaccgccatgggcgcggactatctgagttgcgacagccgcctcatcagtgactttgaagacacggacggtgaaggaggcgcctacactgacaatgagctggatgagccagccgaggagccgctggtgtcgtccatcacccgctcctcggagccggtgcagcacgaggagagcataaggaaacccagcccagagccacgagctcagatgaggagggctgctagcagcgatcaacttagggacaatagcccgcccccagcattcaagccagagccgcccaaggccaaaacccagaacaaagaagaatcctatgacttctccaaatcctatgaatataagtcaaacccctctgccgttgctggtaatgaaactcctggggcatctaccaaaggttatcctcctcctgttgcagcaaaacctacctttgggcggtctatactgaagccctccactcccatccctcctcaagagggtgaggaggtgggagagagcagtgaggagcaagataatgctcccaaatcagtcctgggcaaagtcaaaatatttgagaagatggatcacaaggccaggttacagagaatgcaggagctccaggaagcacagaatgcaaggatcgaaattgcccagaagcatcctgatatctatgcagttccaatcaaaacgcacaagccagaccctggcacgccccagcacacgagttccagaccccctgagccacagaaagctccttccagaccttatcaggataccagaggaagttatggcagtgatgccgaggaggaggagtaccgccagcagctgtcagaacactccaagcgcggttactatggccagtctgcccgataccgggacacagaattatagatgtctgagcacggactctcccaggcctgcctgcatggcatcagactagccactcctgccaggccgccgggatggttcttctccagttagaatgcaccatggagacgtggtgggactccagctcgtgtgtcctcatggagaacccaggggacagctggtgcaaattcagaactgagggctctgtttgtgggactgggttagaggagtctgtggctttttgttcagaattaagcagaacactgcagtcagatcctgttacttgcttcagtggaccgaaatctgtattctgtttgcgtacttgtaatatgtatattaagaagcaataactatttttcctcattaatagctgccttcaaggactgtttcagtgtgagtcagaatgtgaaaaaggaataaaaaatactgttgggctcaaactaaattcaaagaagtactttattgcaactcttttaagtgccttggatgagaagtgtcttaaattttcttcctttgaagctttaggcagagccataatggactaaaacattttgactaagtttttataccagcttaatagctgtagttttccctgcactgtgtcatcttttcaaggcatttgtctttgtaatattttccataaatttggactgtctatatcataactatacttgatagtttggctataagtgctcaatagcttgaagcccaagaagttggtatcgaaatttgttgtttgtttaaacccaagtgctgcacaaaagcagatacttgaggaaaacactatttccaaaagcacatgtattgacaacagttttataatttaataaaaaggaatacattgcaatccgt

SEQ ID NO: 358 - DNA, 1042 bp, Homo sapiens
  misc_feature: Incyte ID No: 1649584CB1
aagactgactgaaggagcttgcgacttttccgcctcggcaaccggacccagcagcaagcaggacgggcggcgctctgctactggtcccgttaagccagagtagcccaagccctgaagtcactgctcatccggaatggaaatcccgccgaccaactacccagcctccagggcggccttggtggcacagaactacatcaactaccagcaggggaccccgcacagggtgtttgaggtgcagaaggtcaaacaagccagcatggaggatattccaggaagaggacataagtatcaccttaaatttgctgttgaagaaattatacaaaaacaagttaaggtgaactgcacagctgaagtactttacccttcaacgggacaagaaactgcaccagaagtcaacttcacatttgaaggagaaactggaaagaatccagatgaagaagacaacacattttatcaaagacttaagtccatgaaggaaccgctagaagcacaaaatattccagacaattttggaaatgtatctccagaaatgacgctcgttctacatttagcctgggttgcctgtggttatataatatggcaaaattctactgaagacacatggtataaaatggtaaaaattcaaactgtcaagcaagtgcaaagaaatgatgactttattgaattagactacaccattctacttcataatatagcatctcaggagattattccctggcaaatgcaagttctctggcatccacaatacggcactaaagtaaaacataatagccgtctgccaaaggaagtacaactggaataaacaaaaaccctaacactggaagtgtaaacatgtctattgatgtgtatgccaatttcactggcatctagcttatgaggccaaataatcccaaagtgtcactttatataaatgtcttgattacagtatagaactttatagagtccataatacaaagtatcactacataaaaatgtctttaaaacagtaatagtggtatgtatatccaaaataaaaagcttcaatttcagcctcaaaaaaaaa

SEQ ID NO: 359 - DNA, 7792 bp, Homo sapiens
  misc_feature: Incyte ID No: 2171870CB1
cgggttcccagggttcgtagcttccaacggctgcgcgcgcacttcggtcgcgggcggtgaggtgctgttgctgaaacgctgccgctgagggtggactcgatttcccagggtcccgccgcgggagtctccggcgggcgggcgcgcgcgagccaccgagcgaggtgatagaggcggcggcccaggcgtctgggtcctgctggtcttcgcctttcttctccgcttctaccccgtcggccgctgccactggggtccctggccccaccgacatggcggcggtgttgcagcaagtcctggagcgcacggagctgaacaagctgcccaagtctgtccagaacaaacttgaaaagttccttgctgatcagcaatccgagatcgatggcctgaaggggcggcatgagaaatttaaggtggagagcgaacaacagtattttgaaatagaaaagaggttgtcccacagtcaggagagacttgtgaatgaaacccgagagtgtcaaagcttgcggcttgagctagagaaactcaacaatcaactgaaggcactaactgagaaaaacaaagaacttgaaattgctcaggatcgcaatattgccattcagagccaatttacaagaacaaaggaagaattagaagctgagaaaagagacttaattagaaccaatgagagactatctcaagaacttgaatacttaacagaggatgttaaacgtctgaatgaaaaacttaaagaaagcaatacaacaaagggtgaacttcagttaaaattggatgaacttcaagcttctgatgtttctgttaagtatcgagaaaaacgcttggagcaagaaaaggaattgctacatagtcagaatacatggctgaatacagagttgaaaaccaaaactgatgaacttctggctcttggaagagaaaaagggaatgagattctagagcttaaatgtaatcttgaaaataaaaaagaagaggtttctagactggaagaacaaatgaatggcttaaaaacatcaaatgaacatcttcaaaagcatgtggaggatctgttgaccaaattaaaagaggccaaggaacaacaggccagtatggaagagaaattccacaatgaattaaatgcccacataaaactttctaatttgtacaagagtgccgctgatgactcagaagcaaagagcaatgaactaacccgggcagtagaggaactacacaaacttttgaaagaagctggtgaagccaacaaagcaatacaagatcatcttctagaggtggagcaatccaaagatcaaatggaaaaagaaatgcttgagaaaatagggagattggagaaggaattagagaatgcaaatgaccttctttctgccacaaaacgtaaaggagccatattgtctgaagaagagcttgccgccatgtctcctactgcagcagctgtagctaagatagtgaaacctgggatgaaactaactgagctctataatgcttatgtggaaactcaggatcagttgcttttggagaaactagagaacaaaagaattaataagtacctagatgaaatagtgaaagaagtggaagccaaagcaccaattttgaaacgccagcgtgaggaatatgaacgtgcacagaaagctgtagcaagtttatctgttaagcttgaacaagctatgaaggagattcagcgattgcaggaggacactgataaagccaacaagcaatcatctgtacttgagagagataatcgaagaatggaaatacaagtaaaagatctttcacaacagattagagtgcttttgatggaacttgaagaagcaaggggtaaccacgtaattcgtgatgaggaagtaagctctgctgatataagtagttcatctgaggtaatatcacagcatctagtatcttacagaaatattgaagagcttcaacaacaaaatcaacgtctcttagtggcccttagagagcttggggaaaccagagaaagagaagaacaagaaacaacttcatccaaaatcactgagcttcagctcaaacttgagagtgcccttactgaactagaacaactccgcaaatcacgacagcatcaaatgcagcttgttgattccatagttcgtcagcgtgatatgtaccgtattttattgtcacaaacaacaggagttgccattccattacatgcttcaagcttagatgatgtttctcttgcatcaactccaaaacgtccaagtacatcacagactgtttccactcctgctccagtacctgttattgaatcaacagaggctatagaggctaaggctgcccttaaacagttgcaggaaatttttgagaactacaaaaaaaaaaaagcagaaaatgaaaaaatacaaaatgagcagcttgagaaacttcaagaacaagttacagatttgcgatcacaaaataccaaaatttctacccagctagattttgcttctaaacgttatgaaatgctgcaagataatgttgaaggatatcgtcgagaaataacatcacttcatgagagaaatcagaaactcactgccacaactcaaaagcaagaacagattatcaatacgatgactcaagatttgagaggagcaaatgagaagctagctgtcgcagaagtaagagcagaaaatttgaagaaggaaaaggaaatgcttaaattgtctgaagttcgtctttctcagcaaagagagtctttgttagctgaacaaagggggcaaaacttactgctaactaatctgcaaacaattcagggaatactggagcgatctgaaacagaaaccaaacaaaggcttagtagccagatagaaaaactggaacatgagatctctcatctaaagaagaagttggaaaatgaggtggaacaaaggcatacacttactagaaatctagatgttcaacttttagatacaaagagacaactggatacagagacaaatcttcatcttaacacaaaagaactattaaaaaatgctcaaaaagaaattgccacattgaaacagcacctcagtaatatggaagtccaagttgcttctcagtcttcacagagaactggtaaaggtcagcctagcaacaaagaagatgtggatgatcttgtgagtcagctaagacagacagaagagcaggtgaatgacttaaaggagagactcaaaacaagtacgagcaatgtggaacaatatcaagcaatggttactagtttagaagaatccctgaacaaggaaaaacaggtgacagaagaagtgcgtaagaatattgaagttcgtttaaaagagtcagctgaatttcagacacagttggaaaagaagttgatggaagtagagaaggaaaaacaagaacttcaggatgataaaagaagagccatagagagcatggaacaacagttatctgaattgaagaaaacactttctagtgttcagaatgaagtacaagaagctcttcagagagcaagcacagctttaagtaatgagcagcaagccagacgtgactgtcaggaacaagctaaaatagctgtggaagctcagaataagtatgagagagaattgatgctgcatgctgctgatgttgaagctctacaagctgcgaaggagcaggtttcaaaaatggcatcagtccgtcagcatttggaagaaacaacacagaaagcagaatcacagttgttggagtgtaaagcatcttgggaggaaagagagagaatgttaaaggatgaagtttccaaatgtgtatgtcgctgtgaagatctggagaaacaaaacagattacttcatgatcagatcgaaaaattaagtgacaaggtcgttgcctctgtgaaggaaggtgtacaaggtccactgaatgtatctctcagtgaagaaggaaaatctcaagaacaaattttggaaattctcagatttatacgacgagaaaaagaaattgctgaaactaggtttgaggtggctcaggttgagagtctgcgttatcgacaaagggttgaacttttagaaagagagctgcaggaactcgaagatagtctaaatgctgaaagggagaaagtccaggtaactgcaaaaacaatggctcagcatgaagaactgatgaagaaaactgaaacaatgaatgtagttatggagaccaataaaatgctaagagaagagaaggagagactagaacaggatctacagcaaatgcaagcaaaggtgaggaaactggagttagatattttacccttacaagaagcaaatgctgagctgagtgagaaaagcggtatgttgcaggcagagaagaagctcttagaagaggatgtcaaacgttggaaagcacgtaaccagcatctagtaagtcaacagaaagatccagatacagaagaatatcggaagctcctttctgaaaaggaagttcatactaagcgtattcaacaattgacagaagaaattggtagacttaaagctgaaattgcaagatcaaatgcatctttgactaacaaccagaacttaattcagagtctgaaggaagatctaaataaagtaagaactgaaaaggaaaccatccagaaggacttagatgccaaaataattgatatccaagaaaaagtcaaaactattactcaagttaagaaaattggacgtaggtacaagactcaatatgaagaacttaaagcacaacaggataaggttatggagacatcggctcagtcctctggagaccatcaggagcagcatgtttcagtccaggaaatgcaggaactcaaagaaacgctcaaccaagctgaaacaaaatcaaaatcacttgaaagtcaagtagagaatctgcagaagacattatctgaaaaagagacagaagcaagaaatctccaggaacagactgtgcaacttcagtctgaactttcacgacttcgtcaggatcttcaagatagaaccacacaggaggagcagctccgacaacagataactgaaaaggaagaaaaaaccagaaaggctattgtagcagcaaagtcaaaaattgcacacttagctggtgtaaaagatcagctaactaaagaaaatgaggagcttaaacaaaggaatggagccttagatcagcagaaagatgaattggatgttcgcattactgcgctaaagtcccaatatgaaggtcgaattagtcgcttggaaagagaactcagggagcatcaagagagacaccttgagcagagagatgagcctcaagaaccttctaataaggtccctgaacagcagagacagatcacattgaaaacaactccagcttctggtgaaagaggaattgccagcacatcagacccaccaacagccaatatcaagccaactcctgttgtgtctactccaagtaaagtgacagctgcagctatggctggaaataagtcaacacccagggctagtatccgcccaatggttacacctgcaactgttacaaatcccactactaccccaacagctacagtgatgcccactacacaagtggaatcacaggaagctatgcagtcagaagggcctgtggaacatgttccagtttttggaagcacaagtggatccgttcgttctactagtcctaatgtccagccttctatctctcaacctattttaactgttcagcaacaaacacaggctacagcttttgtgcaacccactcaacagagtcatcctcagattgagcctgccaatcaagagttatcttcaaacatagtagaggttgttcagagttcaccagttgagcggccttctacttccacagcagtatttggcacagtttcggctacccccagttcttctttgccaaagcgtacacgtgaagaggaagaggatagcaccatagaagcatcagaccaagtctctgatgatacagtggaaatgcctcttccaaagaagttgaaaagtgtcacacctgtaggaactgaggaagaagttatggcagaagaaagtactgatggagaggtagagactcaggtatacaaccaggattctcaagattccattggagaaggagttacccagggagattatacacctatggaagacagtgaagaaacctctcagtctctacaaatagatcttgggccacttcaatcagatcagcagacgacaacttcatcccaggatggtcaaggcaaaggagatgatgtcattgtaattgacagtgatgatgaagaagaggatgaggaagatgatgatgatgatgaagatgacacagggatgggagatgagggtgaagatagtaatgaaggaactggtagtgccgatggcaatgatggttatgaagctgatgatgctgagggtggtgatgggactgatccaggtacagaaacagaagaaagtatgggtggaggtgaaggtaatcacagagctgctgattctcaaaacagtggtgaaggaaatacaggtgctgcagaatcttctttttctcaggaggtttctagagaacaacagccatcatcagcatctgaaagacaggcccctcgagcacctcagtcaccgagacgcccaccacatccacttcccccaagactgaccattcatgccccacctcaggagttgggaccaccagttcagagaattcagatgacccgaaggcagtctgtaggacgtggccttcagttgactccaggaataggtggcatgcaacagcatttttttgatgatgaagacagaacagttccaagtactccaactcttgtggtgccacatcgtactgatggatttgctgaagcaattcattcgccgcaggttgctggtgtccctagattccggtttgggccacctgaagatatgccacaaacaagttctagtcactctgatcttggccagcttgcttctcaaggaggtttaggaatgtatgaaacacccctgttcctagctcatgaagaagagtcaggtggccgaagtgttcccactactccactacaagtagcagccccagtgactgtatttactgagagcaccacctctgatgcttcggaacatgcctctcaatctgttccaatggtgactacatccactggcactttatctacaacaaatgaaacagcaacaggtgatgatggagatgaagtatttgtggaggcagaatctgaaggtattagttcagaagcaggcctagaaattgatagccagcaggaagaagagccggttcaagcatctgatgagtcagatctcccctccaccagccaggatcctccttctagctcatctgtagatactagtagtagtcaaccaaagcctttcagacgagtaagacttcagacaacattgagacaaggtgtccgtggtcgtcagtttaacagacagagaggtgtgagccatgcaatgggagggagaggaggaataaacagaggaaatattaattaaatggtctgtaaacaataacaactgtgaataagattatcaaatctgttttagtgtaatgattgtcaagtttaaaaacatttttatatataaactggtatactcatgtcaatattctttattaataaaatgtttttcagtgtcaaaatttattattcatttcttcattagttgactcctcctttgctcatcagtctaaggacagttgtaccagactttggataaggtctgcccagaacgagtagtaattgctcttgctgttctactaggcacatcaatgttatagtattgatctttagaaaatgcatagtaatcatagccgtcaggttttctgatgttgggcagtgatatagctgaggtaaccacatttggaagtcctctccacagtatactcactttaacttcattatgaaggacacctttgtcttgataagccagtctggcaggtgaatattgaattctgatggtgtgtgtttgag

SEQ ID NO: 360 - DNA, 3709 bp, Homo sapiens
  misc_feature: Incyte ID No: 407135.6
cgccgccggagcgacaggtgatttggcttctgcacagttaggaggagcaccaaaccgatgggaggttttgtcagccacacctacaactataaaagatgaagctggtaatctagtccagattccaagtgctgctacttcaagtgggcagtatgttcttccccttcagaatttgcagaatcaacaaatattttccgttgcaccaggatcagattcatcaaatggtacagtgtccagtgttcaatatcaagtgataccacagatccagtcagcagatggtcagcaggttcaaattggtttcacaggctcttcagataatgggggtataaatcaagaaagcagtcaaattcagatcattcctggctctaatcaaaccttacttgcctctggaacaccttctgctaacatccagaatctcataccacagactggtcaagtccaggttcagggagttgcaattggtggttcatcttttcctggtcaaacccaagtagttgctaatgtgcctcttggtctgccaggaaatattacgtttgtaccaatcaatagtgtcgatctagattctttgggactctcgggcagttctcagacaatgactgcaggcattaatgccgacggacatttgataaacacaggacaagctatggatagttcagacaattcagaaaggactggtgagcgggtttctcctgatattaatgaaactaatactgatacagatttatttgtgccaacatcctcttcatcacagttgcctgttacgatagatagtacaggtatattacaacaaaacacaaatagcttgactacatctagtgggcaggttcattcttcagatcttcagggaaattatatccagtcgcctgtttctgaagagacacaggcacagaatattcaggtttctacagcacagcctgttgtacagcatctacaacttcaagagtctcagcagccaaccagtcaagcccaaattgtgcaaggtattacaccacagacaatccatggtgtgcaagccagtggtcaaaatatatcacaacaggctttgcaaaatcttcagttgcagctgaatcctggaacctttttaattcaggcacagacagtgaccccttctggacaggtaacttggcaaacgtttcaagtacaaggggtccagaacttgcagaatttgcaaatacagaatactgctgcccaacaaataactttgacgcctgttcaaaccctcacacttggtcaagttgcggcaggtggagccttcacttcaactccagttagtctaagcactggtcagttgccaaatctacaaacagttacagtgaactctatagattctgctggtatacagctacatccaggagagaatgctgacagtcctgcagatattaggatcaaggaagaagaacctgatcctgaagagtggcagctcagtggtgattctaccttgaataccaatgacctaacacacttaagagtacaggtggtagatgaagaaggggaccaacaacatcaagaaggaaaaagacttcggagggtagcttgcacctgtcccaactgtaaagaaggtggtggaagaggtaccaatcttgggaaaaagaagcaacacatttgtcatataccaggatgtggtaaagtctatgggaagacctcacatctgagagctcatctgcgttggcattctggagaacgcccttttgtttgtaactggatgtactgtggtaaaagatttactcgaagtgatgaattacagaggcacagaagaacacatacaggtgagaagaaatttgtttgtccagaatgttcaaaacgctttatgagaagtgaccaccttgccaaacatattaaaacacaccagaataaaaaaggtattcactctagcagtacagtgctggcatctgtggaagctgcgcgagatgatactttgattactgcaggaggaacaacgcttatccttgcaaatattcaacaaggttctgtttcagggataggaactgttaatacttccgccaccagcaatcaagatatccttaccaacactgaaatacctttacagcttgtcacagtttctggaaatgagacaatggagtaaatattacacaaatacttattcattgtggttatttttatacagtagtgagaagaatattgttcctaagttcttagatatctttttattgatgtgcaaaaatttttggattgacagtaacttggttatacatgacactgaaatgccttactttgtatgatattccatagtatattaaaaatggtaaaattgcatgggttttgtaggtacttttggaatctagaagaaatgaaattttaccaagttatataaagagaaaattgaatttaacaatgcgaatggtagtctaaccaaatgcatcaatcctgtgtggtttagtgtaaaaatgagaacatgttggtatttatctattgtaagataaaaaagctggtgggtgaaagaaatcatgttatgataaaaaattttgtaattttcttgatgactggaatttttattatgcataactgacaaatcaagtttccaagcaaatgttacatagtgtaggctttacttagcttatcaatttgtcattttgaagctaattattttaattaggttaactatgtacaatattttaagcattactcttgtaagattttgaaaactacattttaacatggaactctagggatagtcaccttttaaatcctgttgaaaagccatgtttaagatttaatttgccaaaataatgtcttgttaatattctttcaataacgaagttgggcaatataaccaatgtttaaaaaagtttaaaatgtataagttgaggcatttgggtggtaagagaatgttatagtgaattatcccttttcttgactattggaggaccaaaaaaataaggtgtattgcgtcttagcagtgatttttatccaatcttgtttccaaaaaccatgtctcccagggccttaaaagccatcatgtaaattaccagtaaagtgtaacatatgcaaacataacaaaatcacttccatagtgacgatactccaaccatatggatattagtcatagaagaactagaggttttatgatatttttttaagtcttttttttttgtctaggtagtcagtctgcacttaaatatcaatcattttccttttttgcttcttcccttaaaatttatatgtatccagtacatttaattgagaagcgtatgttttttattatgctgtattttctttttattttttaattattgtttatattttcaattcaaaaatgtacaaaataaagttacattgctggtcttgtaagagctatacagttttcctaaatgtatacctgtaactgcagcagttcacctatttcaaaaatttggaattctgttcatttgttattcttaagaccacctcaaatttaaaggctaccttattgtacgtttaaagtgtattataacagtgtggtagttaataaaacactatttttttttcttttgagtttgttgtattcctatgcataaaaaatattgcagtggtatggggtaagaattggtggtttatttttcttcaacttggctttttatttttagattcttgattttagacactgaattgtaaacaggcatttatttgaagaagagatatatagagacactggtcatttactaattttttacctagagtaaataagaatgagcttattaaataaaatttttga

SEQ ID NO: 361 - DNA, 2880 bp, Homo sapiens
  misc_feature: Incyte ID No: 128778CB1
ggctgagattggcagagtgaaatattactgccgagggaacgtagcagggcacacgtctcgcctctttgcgactcggtgccccgtttctccccatcacctacttacttcctggttgcaacctctcttcctctgggacttttgcaccgggagctccagattcgctaccccgcagcgctgcggtctcggcaggcagaggcaccccgtacactgcagagacccgaccctccttgctaccttctagccagaactactgcaggctgattccccctacacactctctctgctcttcccatgcaaagcagaactccgttgcctcaacgtccaacccttctgcagctgtgcagtccggccaccccaagaccttgctgcagggtgcttcggatcctgatcgtgagtcgcggggtccactccccgcccttagccagtgcccagggggcaacagcggcgatcgcaacctctagtttgagtcaaggtccagtttgaatgaccgctctcagctggtgaagacatgacgaccctggactccaacaacaacacaggtggcgtcatcacctacattggctccagtggctcctccccaagccgcaccagccctgaatccctctatagtgacaactccaatggcagcttccagtccctgacccaaggctgtcccacctacttcccaccatcccccactggctccctcacccaagacccggctcgctcctttgggagcattccacccagcctgagtgatgacggctccccttcttcctcatcttcctcgtcgtcatcctcctcctccttctataatgggagcccccctgggagtctacaagtggccatggaggacagcagccgagtgtcccccagcaagagcaccagcaacatcaccaagctgaatggcatggtgttactgtgtaaagtgtgtggggacgttgcctcgggcttccactacggtgtgcacgcctgcgagggctgcaagggctttttccgtcggagcatccagcagaacatccagtacaaaaggtgtctgaagaatgagaattgctccatcgtccgcatcaatcgcaaccgctgccagcaatgtcgcttcaagaagtgtctctctgtgggcatgtctcgagacgctgtgcgttttgggcgcatccccaaacgagagaagcagcggatgcttgctgagatgcagagtgccatgaacctggccaacaaccagttgagcagccagtgcccgctggagacttcacccacccagcaccccaccccaggccccatgggcccctcgccaccccctgctccggtcccctcacccctggtgggcttctcccagtttccacaacagctgacgcctcccagatccccaagccctgagcccacagtggaggatgtgatatcccaggtggcccgggcccatcgagagatcttcacctacgcccatgacaagctgggcagctcacctggcaacttcaatgccaaccatgcatcaggtagccctccagccaccaccccacatcgctgggaaaatcagggctgcccacctgcccccaatgacaacaacaccttggctgcccagcgtcataacgaggccctaaatggtctgcgccaggctccctcctcctaccctcccacctggcctcctggccctgcacaccacagctgccaccagtccaacagcaacgggcaccgtctatgccccacccacgtgtatgcagccccagaaggcaaggcacctgccaacagtccccggcagggcaactcaaagaatgttctgctggcatgtcctatgaacatgtacccgcatggacgcagtgggcgaacggtgcaggagatctgggaggatttctccatgagcttcacgcccgctgtgcgggaggtggtagagtttgccaaacacatcccgggcttccgtgacctttctcagcatgaccaagtcaccctgcttaaggctggcacctttgaggtgctgatggtgcgctttgcttcgttgttcaacgtgaaggaccagacagtgatgttcctaagccgcaccacctacagcctgcaggagcttggtgccatgggcatgggagacctgctcagtgccatgttcgacttcagcgagaagctcaactccctggcgcttaccgaggaggagctgggcctcttcaccgcggtggtgcttgtctctgcagaccgctcgggcatggagaattccgcttcggtggagcagctccaggagacgctgctgcgggctcttcgggctctggtgctgaagaaccggcccttggagacttcccgcttcaccaagctgctgctcaagctgccggacctgcggaccctgaacaacatgcattccgagaagctgctgtccttccgggtggacgcccagtgacccgcccggccggccttctgccgctgcccccttgtacagaatcgaactctgcacttctctctcctttacgagacgaaaaggaaaagcaaaccagaatcttatttatattgttataaaatattccaagatgagcctctggccccctgagccttcttgtaaatacctgcctccctcccccatcaccgaacttcccctcctcccctatttaaaccactctgtctcccccacaaccctcccctggccctctgatttgttctgttcctgtctcaaatccaatagttcacagctgagctggcttctgtggtgtgtgctcgtttggggggtggggtggaaatactgccaaggctggggggggccacctctccatctggtcagtttgtggggtgggtactctgccagcagatgggaggatatagggaaacagcacacaagtctaaggggggtgccaatggggttaggttcatcatatattgattacataaatatatagttaaatagacgagcaacagttaccataaaatatcttt

SEQ ID NO: 362 - DNA, 1686 bp, Homo sapiens
  misc_feature: Incyte ID No: 3507970CB1
ctagagtcaaacctccgtgcttctcagacagtgccttttcaccatgagtgggtgcccatttttaggaaacaactttggatatacttttaaaaaactccccgtagaaggcagcgaagaagacaaatcacaaactggtgtgaatagagccagcaaaggaggtcttatctatgggaactacctgcatttggaaaaagttttgaatgcacaagaactgcaaagtgaaacaaaaggaaataaaatccatgatgaacatctttttatcataactcatcaagcttatgaactctggtttaagcaaatcctctgggagttggattctgttcgagagatctttcagaatggccatgtcagagatgaaaggaacatgcttaaggttgtttctcggatgcaccgagtgtcagtgatcctgaaactgctggtgcagcagttttccattctggagacgatgacagccttggacttcaatgacttcagagagtacttatctccagcatcaggcttccagagtttgcaattccgactattagaaaacaagataggtgttcttcagaacatgagagtcccttataacagaagacattatcgtgataacttcaaaggagaagaaaatgaactgctacttaaatctgagcaggaaaagacacttctggaattagtggaggcatggctggaaagaactccaggtttagagccacatggatttaacttctggggaaagcttgaaaaaaatatcaccagaggcctggaagaggaattcataaggattcaggctaaagaagagtctgaagaaaaagaggaacaggtggctgaatttcagaagcaaaaagaggtgctactgtccttatttgatgagaaacgtcatgaacatctccttagtaaaggtgaaagacggctgtcatacagagcacttcagggagcattgatgatatatttttacagggaagagcctaggttccaggtgccttttcagttgctgacttctcttatggacatagattcactgatgaccaaatggagatataaccatgtgtgcatggtgcacagaatgctgggcagcaaagctggcaccggtggttcctcaggctatcactacctgcgatcaactgtgagtgataggtacaaggtatttgtagatttatttaatctttcaacatacctgattccccgacactggataccgaagatgaacccaaccattcacaaatttctatatacagcagaatactgtgatagctcctacttcagcagtgatgaatcagattaaaatcgtctgcaaaatctatgaagaatactggtttcacagcctattttttattttctatggattttcataaatacagtttgaatatatgtatgcatatattgttcagcaccacgatgctctgatttaattctagaaacaatttgattacctcttgtttgtgacaagactaagcattaagatgagaaagaatacatttaaatagtaacattgtacatagggtgttttcctattaaaaattcagtttcccctgagacttaatgtaaccacttaatgtaatcactatctcattgtttcatctttataaacttgtaaacttcatctatttcaaatattttatgcagtacattatattattctgtacaaaggctttcaaacaaaatttttaaaataataaagtattaatctttaaaaaaaaaaaaaaa

SEQ ID NO: 363 - DNA, 669 bp, Homo sapiens
  misc_feature: Incyte ID No: 997407.8
aaaaaaatttgttcgaatgccttatagccttcctcacagcacccaggattgtgactgactctgcatttttaattcttgaaacttggctttccataacatggtacatgcttcaggactacatatgacccagagagcaaggtggctgaactatagtctggaagccctcaggtaaagaggcacatctcaccactcattggttaaacaatgcatcatagcgagcacttttcctttccctggagaatgggatgtgaagcagtagaccgcagccacgccgatggttatacagtgaagaagacttcacctcttcctattgagtttgcttggaatgctgacagcatcaggcaactctgaactgaacatttgctttgtcagaaaatatctttttttttactttgaagtttggcaaccttcatgttaccccaaagcaaaaccattgtgtcaggagtcaaacaaatgtttagaaagcaaacatgacgtctctattgtacaacctcctttctcttggctgtttaaaggatgtacttcgtgtattaaagggtactttatgttgaagtaacgaaaaaaccctaatgggtattcctaaacctaaaccttttctttattccacatttgctacggtaaaatcctgttacaaaactaccctataaagaattattttctatagttaaa

SEQ ID NO: 364 - DNA, 1813 bp, Homo sapiens
  misc_feature: Incyte ID No: 3213746CB1
cccgtctacactggggtggtgcttagccggcgccagaccgaccctcgacttcggagaggcagcgcggttcctctgggtgcttccgcctccccttctcctgcttctccagcctcttcggcctcctcgcccgccgcgggaacccgagaccccagtgtatgccccacccctgaccccgctcgcgacatgtccaccccggctcggcggcgcctcatgcgggacttcaagaggttgcaggaggatcctccagccggagtcagcggggctccgtccgagaacaacataatggtgtggaacgcggtcattttcgggcctgaagggaccccgtttgaggatggaacatttaaacttacaatagaattcactgaagaatatccaaataaaccacctacagttagatttgtctctaagatgttccatccaaatgtctatgcagatggtagtatatgtctggacatacttcagaaccgttggagtccaacctatgatgtgtcttccattctaacatccatacagtctctgttggatgaacccaatcccaatagtccagcaaacagccaggctgctcagctgtaccaggagaacaaacgggaatatgaaaagcgtgtttctgcaatagtagaacaaagctggcgtgattgttgaccccgggtacagtttaaagaagctggccataagaaaaatatatattgatgtgtttgtcacctccctactcctgtcattacatttactttattaaaagcaaaataactgttgtgctgtttccatcttccttgccaagttttcctaccccttctaccctctccttaaacatcagaaaacaccctctatgaaatcaaatgtactgtacctgggttacttgcaaaaattactaatgcttcagtttttctgttgtatttcatttccagttttcaggcagttatttttattattgtactttaagcttttaagatgaattgttatacaagaggtgcttatgcttagcttgatgaccaggatgttatttttaacaaaatgattgctgaagtgtttcatcctggctggtccttcacttgtgttggatttagaagtgaatgtgtttggaatatggcctacagagaatagaaacaaatccatgtaaacaattttgaaggaggcatgggagctaaaaatcctgtgatactaagatctcagtcatatgaattacaacgtagtatttactggcaagaaggagaaagttgaaggactcagctaaaggagtacagcaattgtagtaactgacacatcctctctttgcaagctgctgactgggcacactcatgccaagtttcagaattattggtcttctgggtttttgctttttaaaagaggtgtgggagcagaggaatggaaacaatcgtgagtttttgagctagggaaagttggagctcctttaatctttttaaaggatcagtgctgccctaagtgaataaactcaattgtccatctttattttagagttttaatgaattcaaggaagggagcatagcatatctgtggcaaactattttccactcaaatcctgagttattgctgcatgctttaatttcttccctttcagcatctgagaaccttaaagccaatgtctgcgatctttttttggatatttatacttttagatatatagtacctttaagtagcagtatgggacaaggcttgtaaatgttttgtctaatgttctattgtcaccttttatgcatttatcacttccaaatctaactttgcacaagtaacccatgtaaaaaaaaatgtacatttttcaaaagttgtaaataaaaataaccttaaaaaaaaaaaa

SEQ ID NO: 365 - DNA, 1515 bp, Homo sapiens
  misc_feature: Incyte ID No: 990135.9
gcgaggcgtacgggaagttactgcagccgcggtgttgtgctgtggggaagggagaaggatttgtaaaccccggagcgaggttctgcttacccgaggccgctgctgtgcggagacccccgggtgaagccaccgtcatcatgtctgaccaggaggcaaaaccttcaactgaggacttgggggataagaaggaaggtgaatatattaaactcaaagtcattggacaggatagcagtgagattcacttcaaagtgaaaatgacaacacatctcaagaaactcaaagaatcatactgtcaaagacagggtgttccaatgaattcactcaggtttctctttgagggtcagagaattgctgataatcatactccaaaagaactgggaatggaggaagaagatgtgattgaagtttatcaggaacaaacggggggtcattcaacagtttagatattctttttattttttttcttttccctcaatccttttttattttttaaaaataggtccttttgtaatgtgggtgttcaaaacggaattgaaaactggcaccccatctctttgaaacatctggtaatttgaattctagtgctcattattcattattgtttgttttcattgtgctgatttttggtgatcaagcctcagtccccttcatattaccctctcctttttaaaaattacgtgtgcacagagaggtcacctttttcaggacattgcattttcaggctttgttctagcatgtgattacttcactcctggactgtgactttcagtgggagatggaagtttttgtggtgataaataagatcgaccaatgcaagtgttcataatgactttccaattggccctgacagagaactgaactgtggaaaaatgacctttccttaacttgaagctacttttaaaatttgagggtctggaccaaaagaagaggaatatcaggttgaagtcaagatgacagataaggtgagagtaatgactaactccaaagatggcttcactgaagaaaaggcattttaagattttttaaaaatcttgtcagaagatcccagaaaagttctaattttcattagcaattaataaagctatacatgcagaaatgaatacaacagaacactgctctttttgattttatttgtactttttggcctgggatatgggttttaaatggacattgtctgtaccagcttcattaaaataaacaatatttgtaaaaatcatactaatgcttattttattttaattgtatagaaagaaaaaaatgcctaaaataaggttttcttgcataaatactggaaattgcacatggtacaaattttttcttcattactgtacagtgatgatgttaatgactttgaagcactgaaagttactgaagtgccttctgaatcaaggatttaattaaggccacaatacctttttaatactcagtgttctgtttttttaaaaacttgatattcctgtatggtgcatatatgatacagttacctaatcatgttgaataaatgggcatgccaaa

SEQ ID NO: 366 - DNA, 2449 bp, Homo sapiens
  misc_feature: Incyte ID No: 1655123CB1
cgttgccgggctctccggaaggagacgtggcggcggttgggccggtgatacccgggcgctttatagtcccgccgcctcctcctccaccctcccctcctcctcctctcctcctggagcagaggaggttgtggcggtggctggagaaagcggcggcggaggatggaggaaggaggcggcggcgtacggagtctggtcccgggcgggccggtgttactggtcctctgcggcctcctggaggcgtccggcggcggccgagcccttcctcaactcagcgatgacatccctttccgagtcaactggcccggcaccgagttctctctgcccacaactggagttttatataaagaagataattatgtcatcatgacaactgcacataaagaaaaatataaatgcatacttccccttgtgacaagtggggatgaggaagaagaaaaggattataaaggccctaatccaagagagcttttggagccactatttaaacaaagcagttgttcctacagaattgagtcttattggacttacgaagtatgtcatggaaaacacattcggcagtaccatgaagagaaagaaactggtcagaaaataaatattcacgagtactaccttgggaatatgttggccaagaaccttctatttgaaaaagaacgagaagcagaagaaaaggaaaaatcaaatgagattcccactaaaaatatcgaaggtcagatgacaccatactatcctgtgggaatgggaaatggtacaccttgtagtttgaaacagaaccggcccagatcaagtactgtgatgtacatatgtcatcctgaatctaagcatgaaattctttcagtagctgaagttacaacttgtgaatatgaagttgtcattttgacaccactcttgtgcagtcatcctaaatataggttcagagcatctcctgtgaatgacatattttgtcaatcactgccaggatctccatttaagcccctcaccctgaggcagctggagcagcaggaagaaatactaagggtgccttttaggagaaataaagaggaagatttgcaatcaactaaagaagagagatttccagcgatccacaagtcgattgctattggctctcagccagtgctcactgttgggacaacccacatatccaaattgacagatgaccaactcataaaagagtttcttagtggttcttactgctttcgtgggggtgtcggttggtggaaatatgaattctgctatggcaaacatgtacatcaataccatgaggacaaggatagtgggaaaacctctgtggttgtcgggacatggaaccaagaagagcatattgaatgggctaagaagaatactgctagagcttatcatcttcaagacgatggtacccagacagtcaggatggtgtcacatttttatggaaatggagatatttgtgatataactgacaaaccaagacaggtgactgtaaaactaaagtgcaaagaatcagattcacctcatgctgttactgtatatatgctagagcctcactcctgtcaatatattcttggggttgaatctccagtgatctgtaaaatcttagatacagcagatgaaaatggacttctttctctccccaactaaaggatattaaagttaggggaaagaaaagatcattgaaagtcatgataatttctgtcccactgtgtctcattatagagttctcagccattggacctcttctaaaggatggtataaaatgactctcaaccactttgtgaatacatatgtgtatataagaggttattgataaacttctgaggcagacatttgtctcgctttttttcatttttgttgtgtcttataaactgactgtttttctttgcttggatactgtgattccaaaataaatctcatccaagcaagttagagtccagcctaatcaaatgtcataattgttgtacctattgaaagtttttaaataatagatttattatgtaaattatagtatatgtaagtagctaatgaagtaaagatcatgaagaaagaaattgataggtgtaaatgagagaccatgtaaaatatgtaaattctagtacctgaaatcctttcaacagatttttatatagcaactgctctctgcaagtagttaaactagaaactgggcacatggtagaggctcacatgggagttgtcctcacccttgttaatctcaagaaactcttatttataataggttgcttctctctcagaacttttatctattacttttttcttcttatgagtatgtttactctcagagtatctatctgatgtagacagttggtgatgcttctgagactcagaatggtttactctaacaaaacactgtgctgtctatcccttgtacttgcctactgtaatatggatttcacttctgaacagtttacagcacaatatttattttaaagtgaataaaatgtccacaagcaaaaaaaaaaaa

SEQ ID NO: 367 - DNA, 2933 bp, Homo sapiens
  misc_feature: Incyte ID No: 1095158.17
cgtgaggtgcattctcgcgccggtggcgaggttagggcccgcgttgcgacgtggtgcagcgcatattttcacaagtgggtctcccttgtccgggactatggccaccgactcgtgggccctggcggtggacgagcaggaagcggctgtcaagtcgatgaccaatttgcagatcaaggaagagaaagtcaaagcagataccaatggtattatcaaaaccagtaccactgccgagaaaacagatgaagaggagaaagaggacagagctgcccagtccttactcaacaagctgatcagaagcaaccttgttgataacacaaaccaagtggaagtcctgcaacgggatccaaactcccctctgtactcggtgaagtcgtttgaagagcttcggctgaaaccacagcttctccagggagtctatgccatgggcttcaatcgaccctccaagatacaagagaacgcattacccatgatgcttgctgaacccccacagaatctgattgcccagtctcagtctggcactggtaaaacagctgcctttgtcttagccatgctcagccgagtggagccatcagacagatacccccagtgtctgtgcctctccccaacatatgagctggcgcttcaaacaggaaaagtgattgagcagatgggcaaattttacccagaactgaagcttgcctatgccgttcgaggcaataaattggaaagaggccagaagatcagtgagcagattgtcattggcacccctgggaccgtgctggactggtgctccaagctcaagttcattgatcccaagaaaatcaaggtgtttgttctggatgaggctgatgtcatgatagccactcagggccaccaagatcagagcatccgcatccagaggatgctgcccaggaactgccagatgctgcttttctccgccacctttgaagactctgtgtggaagtttgcccagaaagtggtcccagacccaaatgttatcaaactgaagcgtgaggaagagaccctggataccatcaagcagtactatgtcctgtgcagcagcagagacgagaagttccaggccttgtgtaacctctacggggccatcaccattgctcaagccatgatcttctgccatactcgcaaaacagctagttggctggcagcagagctctcaaaagaaggccaccaggtggctctgctgagtggggagatgatggtggagcagagggctgcggtgattgagcgcttccgagagggcaaagagaaggttttggtgaccaccaacgtgtgtgcccgcggcattgatgttgaacaagtgtctgtcgtcatcaactttgatcttcccgtggacaaggacgggaatcctgacaatgagacctacctgcaccggatcgggcgcacgggccgctttggcaagaggggcctggcagtgaacatggtggacagcaagcacagcatgaacatcctgaacagaatccaggagcattttaataagaagatagaaagattggacacagatgatttggacgagattgagaaaatagccaactgagaagctccaccagccactgatgccagccctggcactgcccctgcacaggagacaagtgcatttagggcacaggccccgacatcaccccaaggacaacggcagaagtagagagaaactacctacctcacttcaaattatgtttggacttgacaaaaataggtgcaaatgatggggggcaatagaagaaaaaatttgcattttggaaaattgggtcctttccccacttttttaaagccacattcccccatctttataataatctggtcacagtggtagtcgctggccccaggaccccctcctgattttggctaggcatcgtggaaccagctccagcccctgaagaaacgatagatgtgcaggttgtgcggaagaggctgagtggaaaatggtgtgagccccaccgctgtgcatcgaatgagggaagtggcagcagagaggccagagctgccccctctctgtctcttcaatggacccttcacaagtgtttctcctgcccttggggctgtcttccttctcctgaaatccagagactttcttgctcatcccttctccctttcacttctgttctctgctgcagaaagcagacttgcatatccctgatgagcagctcggctacttttgtaaacttcagatttggagagaaacacgaaagtctgaatcctgaccccttgagagagagtgatctggcgagggccgatgaaggggctgggcctggtcttgccttctcttctctcggttgctccctctgcctaggcccctggtactcagtcacggcagccaggagaccccaggtgagtttctgagcgcatacgtagttggttcttacccccaggtgtcacacggggccgagagctgagcaagaatttggaatggaagttatgaccaagggaattatgctgttcatttataatagtggacattatggagagctctgattcctacataatatgaataaggatggataggccgggcgtggtggctcatgcctataatcccagcacgttgggaggctgaggcgggcggatcggttgagctcaggcgttcgggaccagcctggccaacatgatgaaaccccgtctctaccaaaaatagaaaaaaatatagccgggcctggtggcgcacgcctgtggtcccagctactcgggaggctgaggtaggaggatcgcttgagcctgggtagaggctgctgtgagctgaaatggcgccactgcactccagcctgggtaacagagcgagaccccgactcaataaataaataaggatggataaattgtagcgtatgcaccattcattatgctaagacattttaaagtaattatgagaaacgctctactaatgatttgtttttatttgtatttttctgcttattagacaaatatatactcattttaaaaaggaa

SEQ ID NO: 368 - DNA, 3367 bp, Homo sapiens
  misc_feature: Incyte ID No: 2895902CB1
atggcggctcctcccactggggggggggtggcgcggcggcggtggcatctgcggccatggcggcgactactgccaaccccgaaatgacatcagatgtaccatcactgggtccagccattgcctctggaaactctggacctggaattcaaggtggaggagccattgtccagagggctattaagcggcgaccagggctggattttgatgatgatggagaagggaacagtaaatttttgaggtgtgatgatgatcagatgtctaacgataaggagcggtttgccaggtcggatgatgagcagagctctgcggataaagagagacttgccagggaaaatcacagtgaaattgaacggcggcgacggaacaagatgacagcctacatcacagaactgtcagatatggtacccacctgtagtgccctggctcgaaaaccagacaagctaaccatcttacgcatggcagtttctcacatgaagtccttgcggggaactggcaacacatccactgatggctcctataagccgtctttcctcactgatcaggaactgaaacatttgatcttggaggcagcagatggctttctgtttattgtctcatgtgagacaggcagggtggtgtatgtgtctgactccgtgactcctgttttgaaccagccacagtctgaatggtttggcagcacactctatgatcaggtgcacccagatgatgtggataaacttcgtgagcagctttccacttcagaaaatgccctgacagggcgtatcctggatctaaagactggaacagtgaaaaaggaaggtcagcagtcttccatgagaatgtgtatgggctcaaggagatcgtttatttgccgaatgaggtgtggcagtagctctgtggacccagtttctgtgaataggctgagctttgtgaggaacagatgcaggaatggacttggctctgtaaaggatggggaacctcacttcgtggtggtccactgcacaggctacatcaaggcctggcccccagcaggtgtttccctcccagatgatgacccagaggctggccagggaagcaagttttgcctagtggccattggcagattgcaggtaactagttctcccaactgtacagacatgagtaatgtttgtcaaccaacagagttcatctcccgacacaacattgagggtatcttcacttttgtggatcaccgctgtgtggctactgttggctaccagccacaggaactcttaggaaagaatattgtagaattctgtcatcctgaagaccagcagcttctaagagacagcttccaacaggtagtgaaattaaaaggccaagtgctgtctgtcatgttccggttccggtctaagaaccaagaatggctctggatgagaaccagctcctttactttccagaacccttactcagatgaaattgagtacatcatctgtaccaacaccaatgtgaagaactctagccaagaaccacggcctacactctccaacacaatccagaggccacaactaggtcccacagctaatttacccctggagatgggctcaggacagctggcacccaggcagcagcaacagcaaacagaattggacatggtaccaggaagagatggactggccagctacaatcattcccaggtggttcagcctgtgacaaccacaggaccagaacacagcaagccccttgagaagtcagatggtttatttgcccaggatagagatccaagattttcagaaatctatcacaacatcaatgcggatcagagtaaaggcatctcctccagcactgtccctgccacccaacagctattctcccagggcaacacattccctcctaccccccggccggcagagaatttcaggaatagtggcctagcccctcctgtaaccattgtccagccatcagcttctgcaggacagatgttggcccagatttcccgccactccaaccccacccaaggagcaaccccaacttggacccctactacccgctcaggcttttctgcccagcaggtggctacccaggctactgctaagactcgtacttcccagtttggtgtgggcagctttcagactccatcctccttcagctccatgtccctccctggtgccccaactgcatcgcctggtgctgctgcctaccctagtctcaccaatcgtggatctaactttgctcctgagactggacagactgcaggacaattccagacacggacagcagagggtgtgggtgtctggccacagtggcagggccagcagcctcatcatcgttcaagttctagtgagcaacatgttcaacaaccgccagcacagcaacctggccagcctgaggtcttccaggagatgctgtccatgctgggagatcagagcaacagctacaacaatgaagaattccctgatctaactatgtttccccccttttcagaatagaactattggggtgaggataaggggtgggggagaaaaaatcactgtttgtttttaaaaagcaaatctttctgtaaacagaataaaagttcctctcccttcccttccctcacccctgacatgtaccccctttcccttctggctgttcccctgctctgttgcctctctaaggtaacatttatagaagaaatggaatgaatctccaaggcttttaggactgtctgaaaatttgaggctgggtgaagttaaaacacctttccttatgtctcctgacctgaaattgtatagtgttgatttgtgctgagatcaagaggcaggttagaagaacctgacatccactgtttgccttggatagtatggcttgtttttggaaagaaattctgaagagagtggaggagaggagaaatgtcctcatatttgaggaccatgaaacattgtaggtatatatggggctttagcaagtttgagcataggctctttttgctgcctgtgagcagtccctctggaaagaaacatgtgagtaagtgagagagagtgtgtgtgtatgtgtgtgtgtgtgtgtgtgtgtgtgcgcacacatgcttctgtatttcactctttctccctattagggagttatgcaaaatttgtccccgattttacctttgtctttctgtgtacttttcaaagagtcctaaggagttaaatcttccaggtattttccacttagtattgcagccaaagaatatttaaataaacgtctttgctgcgcttgcatccatgcccagccaatatacaactgtagagcaaatatagaaaagtcggctgttgatacgattgttctgttatcgaacacattcagtgataaagctgggttactgctgcttttgatgctctcaccttatctgggagatctgcaaacattacctagataggcctgcaagataaacactttctgggagccc

SEQ ID NO: 369 - DNA, 1122 bp, Homo sapiens
  misc_feature: Incyte ID No: 1915066CB1
cggcgccggcctttgtctgcgggcacgcgccgctgcggtgctcaggaacagcccatggaagaatcatatgaagaggtggtgactgaggtcgtaagcaggagtggacatgtttggatttccaacagctaccctgctggactgtcatggaagatatgcccagaatgtagcgttcttcaatgtgatgactgaagcccaccacaaatatgaccactctgaggctacaggatcctcaagctgggatatccaaaattctttcagaagagagaagctggaacaaaaatccccagattcgaagacactacaggaagattcacctggagtgagacaaagggtctatgagtgccaggagtgtggaaaatccttccggcaaaaaggtagtctaacgttacatgagagaatccacactggtcaaaagccttttgagtgcacccactgtggaaaaagcttcagggccaaaggcaatcttgttacacatcaacggatacacacgggagagaagccttatcagtgcaaggagtgtgggaaaagcttcagtcaacgaggtagtctcgctgtccacgagagactccacactggacagaaaccctacgagtgtgctatttgtcagagaagcttcaggaatcagagtaaccttgctgttcacaggagagttcacagtggtgagaagccctatagatgtgatcagtgtggaaaagccttcagtcagaaaggaagcttaattgttcacatcagagtccacacaggcctgaagccctatgcctgtacccagtgcaggaagagtttccacaccagggggaattgtattctgcatggcaaaatccacacaggagagacaccctatctgtgcggccagtgtggaaaaagcttcacccagagagggagtctggctgtgcaccagcgaagctgctcacagaggctcaccctttgaccactttcctgaagagaagttctctttatgaattaagagtacaaaatcctctgagatgaagcaacctatccagttctatggaatgaatggagaatctttcagaaagaccatcattgggtagggcaaactgatttttttcctttcccccaaaagagtatgaaaaataaatgtcttgtttattatcattaaaaaaa

SEQ ID NO: 370 - DNA, 7805 bp, Homo sapiens
  misc_feature: Incyte ID No: 235885.5
agggccccaggtctgtggggcatcctgtcttcctttatgtggggtaactctccgttccgttccccaagccttcacagagtgacaccttcacagataatggggtggggggcctggggtcctctggcagagacatctggggagaaagccagggacctatccctgctgaagcaggtacaggccatcctctggatttgtgggcctgagagtgtgtgtgggtgtgggtgcgcgcgtgcgcgcgcgtgcttttgagaaggcatatgctgggtgtgtctgtctgtgcctatatctttgtttgggtctcccatactgcgtatagatgaatgggtcaggatatctggaacaaaatatggaggtgaagggtgagatcgggaaacaaagggtatggccccctagttcccaaagggagcagggagatgggaatagaattgaaggtaggttttaggctacttgggaggaggaatatttaggtaattgtggagactttctcctgtgtgatgaaggcggcagacactgtgatcctgtgggcaagaagtaaaaatgaccagctgaggatttcttttcctccaggactgtgttggggtgacaggatgcctgataaggatgacattcggctgctgccgtcagcattgggtgtgaagaagagaaaacgaggacccaagaagcagaaggagaacaagccaggaaaaccccgaaaacgcaagaagcgtgacagtgaggaggaatttggttctgagcgagatgagtaccgggagaagtcagagagtgggggcagtgaatatggaaccggaccgggtcggaaacgaagaaggaagcaccgagaaaaaaaggagaagaagacaaagcggcggaaaaagggggagggagatggggggcaaaagcaagtggaacagaagtcatcagcaactctgcttctgacctggggcctggaggatgtggagcatgtgttctctgaggaggattaccacacgctcaccaactacaaagccttcagccagttcatgaggcccctaattgctaagaagaatcctaagatcccaatgtctaagatgatgaccatccttggggccaaatggagagagttcagtgccaacaaccccttcaaggggtcagcagctgctgtggcggcggcagcggcagcagcagcagcagctgtagctgagcaggtgtcagctgctgtctcgtcggccacccccatagcaccctccggaccccccgcccttccaccaccccctgctgctgatatccagcccccacccatccgaagagccaaaaccaaagagggcaaaggtccaggccataagaggcggagtaagagcccccgagtgcctgatggacgcaagaagcttcggggaaagaaaatggcaccactcaaaataaaactagggcttctgggtggcaagaggaagaaaggaggctcgtatgtttttcagagcgacgaaggtcctgaaccagaggctgaggaatcagacctggacagtggcagtgtccacagtgcctcaggccggcctgatggccctgtccgcaccaagaaactaaagagaggccggccaggaaggaagaagaagaaggtcctgggctgtcctgcagtggccggggaggaggaggttgatggctacgagacggatcaccaggattactgtgaggtgtgccagcagggtggggaaattattctgtgtgacacctgccctcgtgcctaccacctcgtctgccttgatcctgagcttgaccgggctccagagggcaaatggagctgccctcactgtgagaaggagggggtccagtgggaggccaaggaggaagaagaagaatcgaagaggagggagaggaagaaggggagaaggaggaggaggatgatcacatggagtactgccgcgtatgcaaggacggcggggagctcctgtgctgtgacgcgtgcatctcctcctaccacattcattgtctaaaccctcccctgcctgacattcccaatggtgaatggctgtgtccccgatgcacatgccccgtgctgaagggtcgagtgcagaagatcctacattggcggtggggggagccacctgtagcagtgccagcccctcaacaggcagatggaaatccagatgtcccacccccccgtcctcttcaaggcagatcagagcgagagttctttgtcaagtgggtaggactatcctactggcactgctcctgggccaaggagcttcagctggaaatcttccatttggttatgtatcgaaactaccagcggaagaatgacatggatgagcccccacccctggactatggctccggcgaggatgatgggaagagcgacaagcgtaaagtgaaagacccgcactatgctgagatggaggagaagtactatcgttttggcatcaagccagagtggatgaccgtccaccgcatcatcaaccacagtgtggataaaaaggggaattaccactatctagtaaaatggagggacttaccatatgaccagtccacgtgggaggaagatgaaatgaatatccctgaatacgaagaacataagcaaagctactggagacaccgagaactaattatgggggaagaccctgcccagccccgcaagtataagaagaagaagaaggagctacagggtgatgggcctcccagttctcccactaatgatcctaccgtgaaatatgagactcagccacggtttatcacagccactggaggcaccctgcacatgtatcagttggaagggctgaactggctacgcttctcctgggcccagggcactgacaccattctagctgatgagatggggctaggcaagaccatacaaaccatcgtcttcctctactcactctacaaggagggccacacaaaaggtcccttcctggtgagtgccccactctctaccatcattaactgggagcgggagttccagatgtgggcacccaaattctatgtggtgacatacacgggtgacaaggacagccgggccatcattcgtgagaatgaattctcctttgaggacaatgccatcaaagggggcaagaaagcttttaagatgaagagggaggcacaggtgaagttccatgttctcctgacatcgtatgagctgatcaccattgatcaggcagcacttggttccatccgctgggcctgtcttgtggtagatgaggcccatcgactcaagaacaaccagtccaagtttttcagggttctcaatggttacaagatagatcataagttgctgctgacaggaaccccattgcagaataatctggaggagctcttccatctcctgaacttcctcaccccagagagatttaacaacttggagggcttcctggaggagtttgctgacatatccaaagaggaccagatcaagaaactgcatgatttgctggggccacacatgctgcggagactcaaggcagatgtctttaagaacatgccagccaagacagagctcatcgttcgggtggagctaagccccatgcagaagaaatactacaaatacatcctgactcgaaattttgaggccttgaattcacgaggtggtgggaaccaggtgtcgctgcttaatatcatgatggatcttaagaagtgctgcaaccatccatacctttttcccgtggctgctatggagtcccccaaactccccagtggggcttatgagggtggggcacttattaagtcgtctgggaagctcatgctgctccagaagatgctgcgaaagctgaaggagcaaggacaccgagtgctcatcttctcgcagatgaccaaaatgttagacttgcttgaggacttcttagactatgaaggctacaagtatgagcgcatcgatggtggtatcacgggtgccctgaggcaggaggccatcgatcggtttaatgctcctggggcccaacaattctgcttcctcctgtccacccgagctgggggcctgggcatcaatctggccactgctgacactgtcatcatctttgattctgactggaacccccataatgacatccaggcctttagccgggctcatcggattgggccaggccaacaaagtgatgatttaccggtttgtgactcgcgcgtcagtggaagagcgaatcacacaagtggccaagagaaagatgatgctgacacacctggttgtgcggcctgggctgggctccaaggcaggctccatgtccaagcaggagcttgacgacattctcaaatttggcactgaagagctattcaaggatgaaaacgagggggagaacaaggaggaggacagcagtgtgattcattatgacaatgaggccatcgctcggctgttggaccggaaccaggatgcaactgaggacactgacgtgcagaacatgaatgagtatctcagctccttcaaggtggcacagtacgtcgtgcgggaagaagacaagattgaggaaattgagcgagagatcatcaagcaggaggagaatgtggaccctgactactgggagaagctgctgaggcatcactatgagcaacagcaggaagacctagcccggaatctaggcaagggcaagcgggttcgcaagcaagttaactacaatgatgctgctcaggaagaccaagacaaccagtcagagtactcggtgggttcagaggaggaggatgaagacttcgatgaacgtcctgaagggcgtagacagtcaaagaggcagctccggaatgagaaagataagccactgcctccactgctggcccgagtcgggggcaacattgaggtgctgggcttcaacacccgtcagcggaaggctttcctcaatgctgtgatgcgctgggggatgccaccacaggatgccttcaccacacagtggctggtgcgggacctgaggggcaagactgagaaggagtttaaggcctatgtgtctttgttcatgcgccatctgtgtgagcctggggcagacggctctgaaacctttgccgatggggtccctcgggagggactgagtcgccagcaggtgttgacccgcattggagtcatgtctctcgtcaaaaagaaggtgcaggagtttgagcacatcaatgggcgttggtcaatgccggaactgatgcctgaccccagcgccgattctaagcgctcctccagagcctcctctcctaccaaaacgtctcccaccactcctgaggcttctgctaccaacagtccctgcacctctaaacctgctactccagctccaagtgagaaaggagaaggcataaggacacctcttgagaaggaggaagctgaaaaccaggaggaaaagccagagaagaacagcagaattggggagaagatggagacagaggctgatgcccccagcccagccccatcacttggggagcggctggagccaaggaagattcctctagaggatgaggtgccaggggtgcctggagagatggagcctgaacctgggtaccgtggggacagagagaagtcagccacagagtcgacgccaggagaaaggggggaggagaagccgttggatggacaggaacacagggagaggccggagggggaaacaggggatttgggcaagagagaagatgtaaaaggtgaccgggagcttcgaccagggcctcgagatgagccacggtccaatgggcgacgagaggaaaagacagagaagccccggttcatgttcaatatcgccgatggtggcttcacagagcttcacacactgtggcagaatgaggaacgggcagctatttcctcggggaaactcaatgagatctggcacagaagacatgactattggcttctggctgggattgtcctccatggctatgcacggtggcaggacatccagaatgatgctcaatttgccattatcaacgagccatttaaaactgaagccaataaggggaactttctggagatgaaaaataagttcctggcccggaggttcaagctcctggagcaggcgctggtgattgaggagcagctgcggcgggcggcctacctgaacctgtcgcaggagccggcgcaccccgccatggccctccacgcccgcttcgccgaggccgagtgcctggccgagagccaccagcacctctccaaggagtcgctggcggggaacaagccggccaacgccgtcctgcacaaggttctgaaccagctggaggagttgctgagcgacatgaaggcggacgtgacccgcctgccagccacgctgtcccgaataccccccatcgcagcccgccttcagatgtccgagcgcagcatcctcagccggctggccagcaagggcacggagccttcaccccacaccggcctacccgccgggtccctacgctacacctccggggtacggggcggccttcagcgccgcacccgtaggggccctggccgccgcaggcgccaattacagccagatgcctgcagggtccttcatcacagccgccaccaacggccctccagtgcttgtgaagaaggagaaggaaatggtgggggcattggtgtcagacgggctggatcggaaggagccccgagccggggaggtgatctgtatagacgactgactggatcccaggcctgcccttcacccaggccccgtccccgaggccgacccccagctcaagcgctggggcctgctgccagccctccaccttccccaccccttgggccatcactgggctaggaacccctttgcccctctctgcagctcctctcttcaagaagggccctttgtctttctccactcccacacacctttcccaccaagccttgaagactgtgctggtgagaagaagtctgggtgggagatggctggcagggtcttccaagtaccttcctcccacactgccaagtatacacaacttcccagtaaatggttgtggggaggaaagaggtggagcctccccagccgtttccctgcagaatcagctctgtctcatgtggaagtggagaatcagccttgcctggcctttaggaacttttgtggggaagagagctttgaagagaggagggggactttagagagggatgaaaatgagccctgggagggaggaagggacgaggaggggtggctgcatgttaccgtcccctacctctccccacgtggagggtggagcagttatgagggaggaagtcaactgctgttcagcctcagaataaaggtgccgttcactggctcagttacctcctgtgtaccggcatcttgtgttgggaatgttcccccctccctagggaccaaggaccacccctacaaaaagagtaatggttgggtgatactccctcaagccaaagaggagctccccaacctgttctagggacccaggtaacctagaagggtgggagagaatacaatgggccagatgtggtggaagcccagctctggggctcaggttcctggaagacttctactaccctccctcctcaaggcctggatacagactaaatttgtataagtcaggcaggggacctagtcagggtcttgggagctaccttgtcgttgggaccagagcaaaatagtggagggcaggctagggaaatgtgggcacatcccccctcccaggaggggccggggagagtggcagtttgcatggcgaaccccccacttcctctttgctgctgtacactttctacaatagtatgctgataagtgaagggacaatagaagtgctgccactaaactttcagttgaggaataattgactggaattttttatttctttaaagtagttatcccaggtcaagttaagaccaagagcttaggcattaagccttaaagactgatcttctcttctccttgaagaaatgtcaatatctatagactcttttccaactattaacctcaagcgcttagctggaggaagaggaataaaat

SEQ ID NO: 371 - DNA, 6233 bp, Homo sapiens
  misc_feature: Incyte ID No: 343986.1
cgccgtgggaagatggcggacggaaagggagacgccgccgctgtcgccggggctggggctgaggctccggcggtagcgggagccggagatggagtcgagactgagtccatggttcggggtcatcgccccgtatctccagcgccgggagcctcgggactgcggccgtgtctgtggcagctggagacagagctgagggagcaagaggtgtcggaggtctcatctttgaactactgccggagcttctgccagactttattgcaatatgcaagcaacaagaatgcatcagaacatattgtgtatcttctggaggtatatcgacttgccatccaaagctttgccagtgcacgtccatacttaactactgaatgtgaagatgtcctcttagtgcttggcagattagtactgagttgtttcgaattactgctttcagtgtctgaaagtgaactgccatgtgaagtctggctaccattccttcagtctctacaggagtcacatgatgcattattggaatttgggaataataacctacaaatattggttcatgttaccaaggaaggggtgtggaaaaacccagttcttcttaaaattctgtctcaacagccagtagaaacggaggaagtcaataaattgattgcacaagaaggaccttcctttctgcaaatgcgaataaaacatttgttgaaatctaactgcatcccccaggctactgctttatcaaaactatgtgcagaatctaaagaaatttcaaatgtgtcatcttttcagcaagcctatatcacatgtttatgttctatgctccctaatgaagatgctattaaggagattgcaaaggtcgactgcaaggaagtactagacatcatttgtaatctggaatctgaggggcaggataacacagcatttgttctttgtacgacttaccttacccagcagctccaaactgcaagtgtatattgttcttgggaactgactcttttttggagtaaactgcaaagaagaattgacccttctttagatacttttttggagcgctgtcgtcagtttggtgtcatagctaaaacgcagcagcatttattttgcctcattagagttatacaaactgaagcacaagatgctggtcttggggtgtcaattttactgtgtgtcagagctcttcaactcagatcaagtgaagatgaggaaatgaaggcatcagtttgtaaaacaattgcctgtcttttaccagaagatttagaagttagacgagcctgtcagcttacagaattcttaattgaacccagtttggatggatttaatatgttagaagaactatatttgcaaccagatcaaaaatttgatgaagaaaatgcaccggttccaaattctcttcgatgtgagctcttactagctttaaaagcccactggccttttgatcctgagttttgggactggaaaactttaaaacgacactgccaccaacttttaggacaagaagcctcagattctgatgatgatttaagtggctatgaaatgtccattaatgacacagatgttttagagtcatttctcagtgactatgatgagggtaaagaagataaacaatatagaagaagagatttgacagatcagcataaggagaaaagagacaaaaaacctattggctcttctgaaagatatcagaggtggcttcagtacaagtttttctgtttgttatgtaagcgggaatgtatagaggctagaattcttcatcattctaagatgcatatggaagatggaatttacacctgtccagtttgtattaaaaaatttaagagaaaagaaatgtttgttcctcatgtgatggagcatgttaaaatgccaccaagcagaagggaccgctctaaaaagaaattactgttaaaaggctctcaaaagggtatttgtcctaagagcccctctgcaatcccagagcaaaaccattcattgaatgaccaagccaaaggagagtctcatgaatacgtcacattcagcaaattagaagattgtcacctgcaagacagagatttgtatccatgtcccggtacagactgttcccgtgtgtttaagcaatttaaatacttaagtgtgcatcttaaagctgaacaccaaaataatgatgaaaatgccaagcactacttggatatgaaaaatagaagagagaagtgtacttactgtcgacgacattttatgtctgcttttcaccttcgagagcacgaacaagtgcattgtgggcctcagccttatatgtgtgtatctatagattgctatgctaggtttggatcagtaaatgaactacttaaccataaacaaaagcatgacgatctgcgttacaaatgtgaattaaatggctgtaatattgttttcagtgacttgggacagctttaccaccatgaagcacaacactttagggatgcatcttacacatgcaacttccttggctgtaaaaagttctattactccaaaattgaataccagaatcacctctcaatgcataatgttgaaaattcaaatggagacataaagaaatcagtgaaacttgaggagtctgcaacaggtgaaaagcaagattgtattaatcagccccatctacttaaccaaactgataaatcacatttacctgaagatcttttctgtgcagaatcagctaattctcaaatagatacagaaactgcagaaaacctgaaagaaaacagtgacagtaattctagtgatcagttaagtcatagctcttcagcttcaatgaatgaagagctaattgacacactagatcactctgaaactatgcaggatgtattgttatctaatgagaaagtctttgggccctccagtttaaaagaaaaatgttccagtatggcagtttgttttgacgggactaagtttacctgtggttttgatggctgtggttccacatacaaaaatgcaagaggaatgcagaaacatttacggaaggttcatccataccatttcaagcccaaaaagataaagacgaaagatctgtttccctctttgggtaatgaacataatcagacaactgaaaagttggatgcagaacctaaaccctgctcagatacaaacagtgactccccagatgaaggtctagatcacaatattcacattaaatgtaaacgagaacatcaaggttattcctcagaatcctccatttgtgcttctaaaaggccctgtacagaggataccatgttggaacttctgttacgcttgaaacatttaagcttgaaaaactcaataacacatggatctttctcagggtcattgcaggggtacccatccagtggtgctaagtctcttcagtcagtttcatctatctcagaccttaattttcagaatcaagatgaaaacatgccaagtcagtaccttgcacagttggcggctaagccgtttttctgtgagcttcaaggatgcaaatatgaatttgtgaccagagaggctctgttaatgcattatcttaaaaagcataattattcaaaagaaaaagtccttcagttaaccatgttccaacatcggtattccccatttcagtgtcatatttgccaaaggtcatttacaagaaaaacacaccttaggattcattataaaaataaacatcaaattggcagtgacagagcaactcacaaactattagataatgaaaagtgtgatcatgaaggcccatgttcagtagataggttgaaaggtgattgttctgcagaacttggaggtgatcccagtagtaactctgagaaaccacactgtcatcctaaaaaggatgaatgtagttctgaaacagatttggaatcatcttgtgaagaaacagaaagtaaaacatctgacatttcatcaccaataggcagccatagagaagaacaagaaggaagagagggcagaggtagcaggcgaactgttgctaaaggaaatctgtgttatattttgaataaataccacaaaccattccattgtattcataaaacttgcaactcctcattcaccaatctaaaaggcttaattcgccattacagaactgtacatcagtacaacaaagaacagttatgtttggagaaagacaaagcaagaaccaaaagggaacttgtcaaatgtaaaaagatatttgcttgcaaatataaggaatgtaataaacgcttcctgtgttccaaagctcttgctaagcactgtagtgattctcataacctagaccatattgaagagcctaaagtactttccgaagctggatctgcagcaaggttttcttgtaaccagcctcagtgccctgctgttttttatacattcaacaagttgaagcaccacttgatggaacagcataatattgaaggggaaatacattcagattatgaaattcattgtgatcttaatggctgtggccagattttcacccatcgcagtaattactcacaacatgtatattaccgacataaagactattatgatgatttgtttagaagccagaaagtagcaaatgagagactactaaggagtgaaaaggtatgtcaaacagctgatactcaggggcatgaacatcagaccaccaggagatcatttaatgctaagtctaaaaaatgtggcttaatcaaagaaaagaaagccccaataagttttaaaaccagagctgaggccctccatatgtgtgtggagcactctgagcacacacagtacccctgcatggttcaaggatgcttatctgtggtgaagttggagagcagcattgtgaggcattacaaacgcactcatcagatgagtagtgcctatttagagcaacagatggagaatcttgttgtttgcgttaagtacggtaccaaaattaaggaggaacccccttctgaagcagatccctgtataaagaaagaagaaaatagaagctgtgaatcagagcgcacagaacacagccattccccgggtgacagtagtgcacccatccagaacactgattgctgtcattcaagtgaaagggatggaggtcagaaagggtgcatagaaagcagctcagtatttgatgcagatactctgctctacaggggaactttgaaatgtaatcatagttccaaaaccacttccctagaacagtgtaatatagttcagcctcctcctccttgtaaaatagaaaattccatacctaatcccaatgggactgaaagtgggacttatttcacaagtttccagctgcctttaccaaggatcaaagaatcagaaactaggcagcatagttcagggcaagaaaacactgtaaaaaatccaacccatgtcccaaaagagaattttaggaaacattcacagccccggtcatttgatttgaagacttacaaacctatgggatttgaatcttcatttctgaaatttattcaggaaagtgaagagaaagaagatgattttgatgattgggagccttcagagcacttaacattaagtaattcttcacagtccagtaatgatttaacagggaatgttgtggcaaataatatggtgaatgacagtgaacctgaagttgacatacctcattcttccagtgactctacaattcatgagaacctgactgcaatcccacctttaatagtagctgaaacaacaacagttccttccttggaaaacctgagggttgtattggacaaagcattaacagactgtggagagcttgccttaaaacagcttcattatcttcggccagtggtggttcttgaaagatctaagttttccacaccaattttagacttatttccaacaaaaaagacagatgagctttgtgtaggaagttcataagtagcaattttgttttagtaacagactggctccaacactgcaacatggggacatttgccaactcgaacaaaggctgagaagcagccacaccgttgtttagggtagaataggctgtgtatttacatgaatgtataatatctatgtcagcagtattggctgagtccattagctctccagttggtttaatgattgggtttatttttgtttgtttgtttattaaaaaaatggaactgtacacttgtttggtgctaattaatacatcaaaatatactggggcttcctttttcaaattaagtgtgcatgattgtatatggaacaaatactaaggtcccagggtgggagggctagggaaagggatatggagttcttacttgacttgaatgtgcacctgagggtgctttgtgtaatatattgtacactacagcatcttatattttttgagttgagtttcaataaattacaatttttcacccatt

SEQ ID NO: 372 - DNA, 1824 bp, Homo sapiens
  misc_feature: Incyte ID No: 233624.48
caaaagcattttcttttatttaagagtcagtttcaaaatacccaatctgttgtgcatgccatctgaagatttctccctgtagctactgctcctacgtcctgtggaagtttatattttgcatgctccccatccttaaaatagatttatccaagctttccattttatgacttctccacaatgtctgtttaggctcggttttaatgttttctgccactactaatcttgcaccttgtttgttctattagactaatcttgaattagcgtttgttgtattagattatataatactagatcacaagtttgatgctgggtatttgaacatttattattctgttctactttggggcgtttttgaaaatttcagtaatacaaagcttaaagtcattacatatatcaagagtacaattcataaacctctctcctttaggactacttatccataataatgatgaaaactattatttttagagccatatcaggcattgtgctagagatgcactttatacagatgtcacatttaatctgtagaacaattctcaaaggtaaacagtatcatccccattttacacttgaaaactgaggttcagagaggccatcaccttacttgcttctgaactggttgtagtgccagggatataaatttaaggtgattcatgttctagtgctttctctgctattagaaccaaggagaaaacatttcttcacattctcatgtctgagaagggtatacacataattctctgttcttaaagtcacctgtgattcataatattcaccagtcacagtcattacttccagaatatctttcctctgttcaggcagcaattctgcatttcttcgagtggtaagatgtcgatccttagctgaagaatatggtttggatacaattaacaaggatgaaattagtaagtataatagccttctgattctgggttaattttaattaatttaaaagatataaatattttgtgtataatagtgttgagtatatggtgatgatataaaagataacgtaaacatattctaattttattctaagcttatctaggtaattataatttatatattatatgaaacttaatgtatgcataaagtcatatttaggtcactgagtccattgtgtgatatgtatgagttaaagtcagtatgttactacttcagtagagattgtgtgactccagttaatagtcctgaaactcaagtatatagtaaattcagcccttcattgtttgttacattgcaaattaaccaaattaaactgaaatttttttttcctttcagtttctagcatggacaatccagataatgaaatagtgttgtacttaatgttacgggctgttgatagatttcataaacaacagggtagatatccaggagtatctaactatcaagttgaagaagatataggaaagttgaagtcttgtctcactggcttccttcaggaatatggtttatctgtaatggtgaaagatgattatgtccacgaattgtgagtattttttagggtatctaggagatgattccacacctgtcataaggctaatcaaaattcatgtctctgtggtctcctttagttgccgatatggagctgctgagccacataccattgctgcattcttggggggagctgctgctcaagaggtcatcaaaataatcaccaaacaatttgtaatttttaataatacttacatttacagtggcatgtcacaaacttcagcaactttccagttgtagagtaagcaagcaccttaagtagtgtgttaatgattgaaactgtaattgcttcgggttgtgctttagtctgtaaaattctaaaggagagct

SEQ ID NO: 373 - DNA, 155 bp, Homo sapiens
  misc_feature: Incyte ID No: 235762.1
ataaagatgaagtagacatcacctatttgtaaattataacagaaaagattaccatccagaattaaaagtacctggaagccaccaagaagcacatagtttgacagcaaagtgaacaagtaaggcaggcgcagtggctcacgcctgtaatcccaaca

SEQ ID NO: 374 - DNA, 4917 bp, Homo sapiens
  misc_feature: Incyte ID No: 350396.2
  unsure 3063, 3065-3067, 3069-3070, 3072, 3078, 3086-3087, 3089, 3096, 3114,3135, 3145, 3147, 3166: a, t, c, g, or other
cggcaatcgatcctgaggacttgcgagccgctcagctcccgggacgtttggagctgctgctaaataatttctgctcagccatgtcgccggctccagatgcagccccggctcctgcgtcgatctccctgtttgacctcagcgcggatgctccggtctttcagggcctgagcctggctcaggggagagagaaagcccagaaagaaagctactccagggtcctatggatatttcagagaagttattttgttcaacttgtgaccagaccttccagaaccaccaagaacagagggaacattataagcttgactggcatcggtttaacctaaagcaacgtctcaaggacaagcctctcctgtctgccctggactttgaaaagcagagctccacaggagatctttccagcatctcgggatcagaagactcagactcagccagtgaggaggacttgcagacactggatcgggagagggctacatttgagaagttgagccgaccccaggcttttaccctcatcgagttcttttccagaatgcccagggccagtttctttatgcctaccgctgtgtcctaggccctcatcaggatcccccagaagaggcagaactgctgctacagaacctgcaaagtagaggtcccagagactgcgtggtgctcatggctgcagctgggcactttgctggtgctatatttcaaggaagagaagtggtgacacacaaaacttttcaccgctatacggttcgggccaagcggggcacagcccaggggcttcgggatgcccgaggtgggccatcacactctgctggagccaacctgaggcgctacaatgaagccacactatataaggatgttcgtgacctgctggcagggccaagctgggctaaggcgctggaggaggctggtacaatactgttgcgtgctccccgctctggccggtctttgttctttggaggcaagggagcacccctgcaaaggggggatccccgactttgggatatccccctcgccacccgcagacccaccttccaagagctacagcgtgtgctccataagctgaccactttgcatgtctatgaagaagaccctcgggaagcagtcagactgcactcacctcagacacactggaaaacagtaagagaggagagaaagaagcctactgaggaagaaataagaaagatctgcagggatgaaaaggaagcgctggggcagaatgaggaatctcccaaacagggtttgattactatctggcaactgtcagatctgagtttctgtcctaaaaatgcactggcaaattccctactctcataactgacccatttccttatttaaacacacacccacagtgtctatcttagcaattactgagacatgtttagtgacctttccaaatctattatctcttttgttatggatgtttccccagagctaagaaaatctttgtgtggagcagatgcgtggatgtgttgcatggatctcacatagtttatctttgattggatgctgtggtttgaggctgagggctgcttccatgctttcctctattgtgcggcaccctaaggctactcatacggagagtccagggacttgttcttgtctgggctgagagcctcatttctgcatgtgatataatggactcagctcttgatgtgctacttttatctgggtgacaaaataaaaacaatttcatttcaggctttcattcttatgcatctgcttctaccctctgagtactccctagatggatttcacatgtcaggtttttccctaggttcagggtcggagggagaagatggctttcaggtagagttggagctagtggagttgactgtggggactctggatctttgtgagtctgaagtattgcccaagcggaggaggagaaaaaggaataagaaggagaaaagccgagaccaggaggctggggcacatcggactcttctccagcaaactcaagaagaggagccttccacacagtcatcccaggcagttgctgcccccttggggccctttgctggatgaggccaaagcccctggtcagccagagctctggaatgcactgcttgctgcttgccgagctggagatgttggagtgctaaagctgcagctagctcccagccctgcagaccctagagttctgtctctgctcagtgcccccttgggctccggtggctttactctcctgcatgcagcagctgcagctggaagaggctcagtggttcgtctgctgctggaagcaggtgctgaccccactgtgcaggactctcgggcccggccaccttatactgttgcggctgacaaatcaacacgtaatgagttccgaaggttcatggagaagaatccagatgcctacgattacaacaaggctcaggtgccaggaccattgacaccagaaatggaggcacggcaggctacacggaaaagggagcagaaggcagcccggcggcaacgggaggaacagcagcagaggcagcaggagcaggaggagcgtgaacgagaagagcagcggcgatttgccgccctcagtgaccgagagaagagagctctggctgcagagcgccgactcgctgcccagttgggagcccctacctctccaatccctgactctgcaatcgtcaatactcgacgctgctggagttgtggggcatccctccaaggcctgactccctttcactacctcgacttctctttctgctccacacgttgcctccaggatcatcgccgtcaggcagggaggccctcttcctgatctcttacagctctacctggggccaactcagggacctgagagggcacattcacagcagccctaggttttttcttccccgtgaaaccagagatgatttggaagatgggggtgaaggacactcgggaactagggcaaagacagggctagaggtatgtggagctggtactgtctctggaattttaatcacaataaagtttggcaaggaatgtgtacttgtacttacattcagaggcactgtggcctttagttccttagggtcaccgtggccagcaccaagggatcctgcccactccatgtcccaggtccaagggtaactttantnnntnngnggtttnatcatgtnngncaggctngtcttgaagtcctgaccncaggtaatccacccgtctcancctcccaaantnctgggattacaggcatganccaccattgcccggcctacctttcagtgcccacttaactccattggttcagaggcactcagtgtatcagctgaaagggaattgatatgtgtcctgtgcaaagtactagtgctattgaggataggcttatccaaaaattggacttggggctggagaggtacatcttctagttccagcaatgtaattttgttgagggctcccctaggaaacagcaggaatcttggcacgtagagggtctgttgtggcccctgctttgtccagtaccggcccaagttaaacccattgatccagacttggcccttggtccatccaggtagatatagaaatgtgtccccaactgagcctaaaattggaaatgttttggagtagaatgtggggccagaaggagcttgaggatatggccattttggcaactggaggggaaaccaccacttcacaaggttatcaattttcagagggaacatcatccactgggtaaggattgtttgccccagaattggtggcttcaacaggcccttgaagtcactgctgttagacccaaagctgagcctccccatgttctccaccaagatatccagtttggaccccagtttccccgtcaaaaatagtttgtctctcatatttcgctccacaacaccctggaacaccccatccaccatcacataggcacggtcatggactccattatttggcacccagaatggtgttggctcaaaaatggtatgggtcatataggttcggtacaacatgaagccatggtcctgcttgacagcctcaaaggtcattggcaagattgaatgaatgggcccacgggggcaaagcaagtctaggaaagccagtaaatgcccaaccaggtgcagagtcacaggtccaagcatcatcttggggctcgggggaggtaaaggtcccaaaggaacttcctggaacttgctgatgacatctcgaagagcaaaaagcttaggtgtggggtcccctgcttcagatataggtgcatcatagtcatagctggtagtaatcggaaggaagcgtcccttcttatcggcaccattccaatatccaaagttggtacctccatggaacatgtacatgttcacactggctcccaacttgagcatgttctctagtcctttggttacagctgacacagaccgtgtggagtgattctggccccagtaatccagccagcctgtgtagtactcagagtttaccaatggcccatggggttcatacttccgaagcagggtaaagattttggtcatgttgtcagctgggccaaaatctacagtggtatagagtccccggagggagccacacttgagtccttcaggcccatctgtggtgaagagcaagatcttttctcctagcagtgcacggaagagcccagccaagtgcctcatgtagctgaagtcacaggctctgtagctaccatattcattctccacctgaatgctaatgatgttgcccccattgtgataaagccatggatatatcttgggcagcaagaccttgaaccaggagtccactgcggcaaggaagtctggatctgaggttcttagatgaatttcaggttttcgaagcaaccaggatgggagaccccccatctcccactctgcacagatgtaaggtcctggtctcagtatgaccaacaggttcgctagagctgcctcattcagaaaggcaatgaggtcccggctgccattaaagttatagaccccaggctgtggctcgtggtagttccagggcacataaaac

SEQ ID NO: 375 - DNA, 366 bp, Homo sapiens
  misc_feature: Incyte ID No: 070790.23
caatttgagccaagataaaattgttgaagaatggtggcttgtttcatggtttttgtatttgtgtctaatgcacgttttaacatgatagacgcaatgcattgtgtagctagttttctggaaaagtcaatcttttaggaattgtttttcagatcttcaataaattttttctttaaatttcaaagaacaatgtgcttgtgttgatgccttacaaaaaccattgtatatttgtgtattccttcttgtatttagacagtggtttttcaggtgcgtgctttgttttctggtatggcctttatggaatgagacgctttagctttggtacgtagcgctaatccatagcagctttggcagtttgctgtcttgagt

SEQ ID NO: 376 - DNA, 3053 bp, Homo sapiens
  misc_feature: Incyte ID No: 234671.68
caaagcgaggaggaggaaaagtctggcctcggcgccaagatcccagtcacaattatcaccgggtatttaggtaactaaccatcccagtcacaaaatggcgtgacctctggtgtcatgggattttgcgggctgccggtgcctcttctcctgaggcattggggcctcatgatcaagagcaaatgtctttgagttattcagaggctgctctgctgagaagatgaacaaatttcttgtccaaaacaatgtatttcaaacgtgccgctcgggcctttcccgtattgctcactggtgctgggaagacaacacttctgaactatattttgacagagcaacatagtaaaagagtagcggtcattttaaatgaatttggggaaggaagtgcgctggagaaatccttagctgtcagccaaggtggagagctctatgaagagtggctggaacttagaaacggttgcctctgctgttcagtgaaggacagtggccttatgagctattgagaatttgatgccaaagaaggggaaatttgattacatatctgttagagaccactggattggcagacccaggtgcagtggcttctatgttttgggttgatgctgaattagggagtgatatttaccttgatggtatcataactattgtggattcaaaatatggattaaaagtgaaataaccactaaaggcagaagagaatgaaatcatcccacccactgacccgttcccaatctgagcatattggatagggcccagaagcacatgttagacagaagagaaacctgagtggccttagtcaatgaagctactaggcaagttgctttggcagatatcattctccattaataaaacagacttggttcccagaagaagatgtaaagaaattaagaacgacaagttagatcccataaatcggactaggacaaatcttagaaacacaaagatcaagagttgatctctctaatgtattagatcttcatgcctttgatagtctctctggaataacgtttgcagaaaaaacttcagccatgtgccaggaacacaacctcaccttgatcagagtattgttacaatcacatttgaagtaccaggaaatgcaaaggaagaacatcttaatatgtttattcagaatctcctgtgggaaaagaatgtgagaaacaaggacaatcactgcatggaggtcataaggctgaaggtacagtttactgttgcagacttttggacaaagtccttttcttggctgttataaaaactatatttggttttaaacagaaacactggttttagtacaaatcatctttgtctactttcatttttctttattattttcatgactgaaaaggagctttggaaatcactgcataaggcttgatttatttgcacaactttctttagggttgcagctagaacaaacctgtgtgctttgaaatgtttaccttctgctctctgttcccaagtacagagaaataatgttgcaaatctcacttctgctgaacattatgcttcctgatgcatttagcagacactaaacatttgtcatactctaaacaaagttacaaaggactagaagaattcttgttctgtatttaggaaacccactcacattacttgatatttggggtatttaagtcatggaaagggtatttcttctagggaggcagtggattctaaagtgtatgcttaaccagtcagttgagtgtctactcttgtgtgttcacaagtgtgcacaaagtttttggtaaattaagaatattatttcaaataaattaatttcatccccataggagccagtttatcagataattcgtttctcatttctgcaaatcaatacacaatgagctcatattcagataaattgagctcatatccagataaatataatagtttttctttatttcaacattgttcattgattgcaacccatttctaaaacaaattatttaatataaccaaactcctttaacttctcaacttttcccactaaaactgtgaaacattatataaaatctttaatcaatagggatatgatacatatttcatcattttgtttcaggttttggttgtgataaaaaacactgaaaaaccatcctaatatatgtattaactttatcattagaaaaggggattgttcaaaaaaaaaatcaatacacagaaaccttttttgaaaattaaaaacattaagaaacttcttgtaattcacaaataattggaattaagtaattttctcagcttaagaatttggattttttaaggtgaatatcagtaattaatcccattaacacttgatgctctatttctgcttttaagtttgaactgaggctgattaatgttcagtcaattctcctttgagcagggattggtgtcaatccaagaccaatcaccaccagtgattgtcccgggtgtccatgagctctatgattctggaggagactcccgtgagctggaaaggaagaccctgaggaggaccaattccgaattggtcccctccttggtaagtctcaaaggattcacagttttaaaactaagtgaaaaatatatttgaaagggatatcatgtgccacttaaacagattaaccattcaggtcctcttttaaaactaaataagcttgtggtcaatgtttcatctttatcatgttacaacgttcgtaaaagcttgttaggacttttgttcttcttcagttttagaaaagtggttaatcccaaggacccaatgtgacctttgatgtactgaccctggaaagttaaagatggaatcactcaattactattctttttgtaaatttctaaacaccataaagcatttaatgaactggaattgataggtgaactgtgtcattttaataagcataatgtaatcacgtcatattttgttttgtttgcaggcagaaatttagataaggatatccttaaacagctgtttatagctactgtgacagaaacagaaaagcagtggacaacacatttcaaagaagatcaagtttgtacataacactagaggcatttcttatcaaaaggattggataataaaaataagtttctactgggaaaaaaaaaaaaaa

SEQ ID NO: 377 - DNA, 2070 bp, Homo sapiens
  misc_feature: Incyte ID No: 233496.3
  unsure 2038: a, t, c, g, or other
gcggtgtcaccgctttcgcttctgcttgagtcagtcctcacggtaatcaagtgaaaaaatgagcttcatctgtggattgcagtctgctgctagaaaccatgttttcttccgatttaattcactgtctaactggagaaaatgtaacacattagcatccacctcacggggctgtcatcaagtacaagttaaccatatagtaaataagtatcagggactgggagtaaatcagtgtgacaggtggagttttctgcctggaaactttcatttttatagtacttttaacaacaaaagaacaggaggcctctcaagtaccaaaagtaaggaaatttggaggattaccagcaaatgtactgtatggaatgatgctttttcaagacagctgctaataaaagaagttacagcagtccctagtctgtcagtattgcatcctctaagccctgcttccataagagctattaggaatttccatacttctccacggtttcaagctgctccggttcctctcttgttgatgattcttaaaccagtacagaagttatttgcaatcattgtaggcaggggcataaggaaatggtggcaggcacttcctcctaacaagaaggaagtagttaaagaaaatataaggaagaataaatggaagctattccttggtttgagtagttttggattgctctttgtggtgttttattttactcacctggaagtaagtccaatcacaggaaggagcaagctactattattggggaaagaacagttcagacttttatcggaactggaatatgaagcatggatggaagaatttaaaaatgatatgctaactgagaaagatgcccgatacctggctgttaaagaagtgctttgtcatctaattgaatgcaataaagatgttccagggatctctcagatcaattgggttattcatgtggttgattccccaattattaatgccttcgtgcttccaaatggacaaatgtttgttttcactggatttttaaatagtgtaaccgatattcatcaactttctttccttctgggccatgaaatagcacatgcagtacttgggcatgctgcagaaaaggctggcatggttcatttgttggatttcctaggtatgattttcctcacaatgatttgggccatttgtcctcgagatagcttggcacttttgtgccagtggatacagtctaaattgcaggagtatatgtttaatagaccatacagcagaaaattggaggccgaagctgacaaaattggactactgcttgctgcaaaggcttgtgcagacataagagccagttcagtgttttggcagcaaatggagtttgttgatagcctgcatggccaacccaagatgccagaatggttatctacacacccttctcatggcaatcgagttgagtacttggatagacttatacctcaggctctcaaaattagagagatgtgtaattgtccaccactgtctaatccagaccctcgattactattcaaactcagcacgaagcattttcttgaagaatcagagaaagaagacctaaatatcacgaagaaacagaaaatggatactcttcctattcaaaaacaggagcaaataccattaacatacatagttgagaaaagaacgggcagttgaattaaaatttatgagacacaagatatatgaagaatgttgcagtccttatcattttatgttactttttaaaaaatgatgtttgaagtgaaaaaaaaaaaggatattcagggtcaaatcatgtacattacagatattatctaaattcttctagaatttatttttcatgaaatattgatgtattttaatctatgttaaaatatcttcaatgaggaaaatgtcacagaataaatttatattacacattttactctgtcttctacttgctttgatttagaaggcagacccctagtggatgagaaatgagcccatacggtagtttttatagtagagaatgtttcaactgagcctaaactggatttctaagtctgggtcgttatgatgaagggggaaacagtctgaagtacngtttgcaggaaatagttgcatgggggggatat

SEQ ID NO: 378 - DNA, 3827 bp, Homo sapiens
  misc_feature: Incyte ID No: 391185.17
  unsure 1002, 3206: a, t, c, g, or other
ccccctgatccttgatcagaactacattaactcctaaaatcaagttatctaagcagagaggagggtgctaaaggagttgggattttgtgttcatgtcaagcatcctcataagatcattgttatgtatttacaagtcttagaatgtgaacgtaatcaaaccctggttcaaactgcctgggtagtccatgatggtaagtcatagaactctgccctctgcacttcagcccatgacctcaggatggcctgattggctaccctgctctccagccaatccagtgcaagctctcatccgagattcatctgaagtggtccatatccatctggcagcatcttctagttctgtcggggtgtcaaaaggatttgtatatttgcttctagaagtaactatttgacatgcctatgtatttaatgtatacttgtaactatcgaaatgaatagttcatttttgatagatttgttgtgcagccattatgaattaaatggtttattaggagtttgactaaatttttatttttagtgtgtatagcatgaatactacccaaggagacgaccaacttgcagcttaaaatgggcaccagttcccacactggcttaatttatataactgcttggctgtattgcgggtaataatattagaagcaagaagcacttcatttttaaaagagatgttactataatattgcttaaatgctttagcacttggacttcttgagatgcagatgtgtgatttggagtgctggcttatttaaagggtcaagccaaggagtttgtggttcagccacaactactgtttcctaagactattgatgtgaaggacttagtgaagtaatttttatattctgggcttcccagcaagatgtcctttttatgactgccatgcttcttttgggactcagctaaactatttgtaactgttagaacaagtctcattatttttataaaaatggcttacattttaaggtatgtgttggcttaaaatggcattatacgcagttctcatgngtattaggatttttaacgaaatagtccatttaatttcagcttaaccttttaaactgcatctgtaacaatttcctttggatcagtttacggaatgtctgtgggcgcagggttcacttacataacaacgttcagccaattttttacactgaaatcagtttatctcttttacctagtacacaaaaaaggtactgtaaacaagggccattatatgtgtttatatgctcctttatttccctatctagattttctaagtatcttatgctttcttaatataagtttaacttggtacttactgaaaatgcctttttacccctgttaacggtattttgagcttttgaaaagaacttgggttgacactgcttttaattgtggataaaggagagatggtcacgtaattaatggcttgaagtattattggagtggtttatcatttctgaaactaatcgtgtcagaattgactttgaaaagcattgctttttacagaaatatattaactttttaggagtaatttctagtttggattgtaatatgaaataatttaaaagggcttcgctcatatataggaaaatcgcatatggtcctagtattaaattcttattgcttactgattttttttgagttaaggagttgttatatgctagaatatgaggatgtgaatataaataagagaagaaaaaaagaataaagtagattgagtctccaattttatgtaagcttcagaagaactggtttgtttacatgccaagccttatagttgaaatatttttccaggaattacatgaatgacagtccttcgaaccaatgtgtttgttcgatttccaacccagagactatagccatgtgcttgcatctaccttgcagctagagcacttcagattccgttgccaactcgtccccattggtttcttctttttggtactacagaagaggaaatccaggaaatctgcatagaaacacttaggctttataccagaaaaaagccaaactatgaattactggaaaaagaagtagaaaaaagaaaagtagccttacaagaagccaaattagaagcacagggattgaatccggatggaactccagccctttcaagcctgggtggattttctccagcctccaagccatgtaagatgtatttagaattaaaatgacttgggggcactgaaagtgtgtctttattagagagcttttacatttgaaagttgcatagagaaaaatgatgttaggaaactgctgctatgttctctcatggcagtcaaccaactatggaagcggaagcatggtactttgagttacatttagaaacaactttgtggccctctgttaaatccagtagttaacatgtcgttattatatcttttaaaagcatcaccaagagaagtaaaagctgaagagaaatcaccaatctccattaatgtgaagacagtcaaaaaagaacctgaggatagacaacaggcttccaaaagcccttacaatgggtgagtatacttgggctggaaaactggcttgaggaatcttttatgtgtttactttttaacacactaagtttgtaactaatatgtcatgattttttgaagtgtaagaaaagacagcaagagaagtagaaatagcagaagtgcaagtcgatcgaggtcaagaacacgatcacgttctaagatcacatactccaagaagaccagtaagtaaatgttttcttaggggaaagcagtcttatttgggagtttttaaaggttattgctttttctttaaaaattgaacatagattattttcaaagttaggttagaattaggcttttagtatgaggcaaattatgagaaatgagtttggagatgttctggacatacagtatcttaatggcattctgttatattttctcccatgttttttggagaagtgtaggagctacccacaaagtgcttgagggccatagtattcgttcataatgtgaaaacttctttttcttttttaaattccagttagaaaatgtgttccattaacccctttttattacccaatattcaatttacccagtcaaggaatcttcttaagtaaggcctgtaattagattgtaagctcttcggggctcttcaatgtcttttggaacatgtgggagatacttaataaaaagcatagctctaggacactataaaaattgctaattactccccttggaataaagacataagaacattgtgctttaagattnttaaatatgttatatataggcttggggcatacagcagtgaggggtggggagattttgaaaaggttctggtttgtcatttatgtatctggtagttttgttttgaacccggtaatgagcaaacaccgcggaattaatttgttgcccatagaaactgaacctaaacttctaatttttatatatatctaagctataatacataggcggagtcgatctgggaacatacagctcgagatcaagaagcatgtttccgcagtcacagtgaaagccctcgaagacatcataatcatggttctcctcaccttaaggccaagcataccagagatgatttaaaacgttcaaacagcacatggtcatacaaggacacaaatctcgtatctcgatctcagagcaagtctcgggatcactcagatgcagccaacaaaacacaggcctgaacggggacatcatagggaccggcgtgaacgatctcgctcctttgagaggtcccataaaagcaagcaccatggtggcagtcgctcaggacatggcaggcacaggcgctgactttctcttcctttgagcctgcatcagttcttggttttgcctatctacagtgtgatgtatggactcaatcaaaaacat

SEQ ID NO: 379 - DNA, 3570 bp, Homo sapiens
  misc_feature: Incyte ID No: 1073620.16
ctttccagaattttttgcctattgtagctatattcataaacagtatttattgttgggtagtaagggaggttttacacatttctccatacctttaaatcacagcaaataaaatggtctttttggaggtaggctggtagtatccctagaactccatcctttttgaatattcttatggcatgtacgatacgttgctttaaaaatactgatgaactaactaaaaattctgttcctagatttggagcaagaggtggtggtggccttcccccgaagaaatttggtaatcctggggagcgtttgcgtaaaaaaaagtgggatttgagtgagctccccaagtttgagaaaaatttttatgtggaacatccggaagtagcaaggctgacaccatatgaggttgatgagctacgccgaaagaaggagattacagtgagggggggagatgtttgtcctaaacccgtgtttgccttccatcatgctaacttcccacaatatgtaatggatgtgttgatggatcagcactttacagaaccaactccaattcagtgccagggatttccgttggctcttagtggccgggatatggtgggcattgctcagactggctctgggaagacgttggcgtatctcctgcctgcaattgttcatattaaccaccagccatacttggaaaggggagatggcccaatcgtgttgagatctgcatagccactcctggacgtctgatagatttcctggagtcaggaaagacaaatcttcgccgatgtacttaccttgtattggacgaagctgacagaatgcttgatatggggtttgaaccccagatccgtaaaattgttgaccaaatcaggcctgataggcagacactgatgtggagtgcaacctggccaaaagaagtaagacagcttgcagaggatttccttcgtgattacacccagatcaacgtaggcaatctggagttgagtgccaaccacaacatcctccagatagtggatgtctgcatggaaagtgaaaaagaccacaagttgatccaactaatggaagaaataatggctgaaaaggaaaacaaaacaataatatttgtggagacaaagagacgctgtgatgatctgactcgaaggatgcgcagagatggttggccagctatgtgtatccatggagacaagagtcaaccagaaagagattgggtacttaatgagttccgttctggaaaggcacccatccttattgctacagatgtagcctcccgtgggctaggtttgtatagataggtgtctctgtcaatggtatatgtatcttttggtttaaagattcgtcatttcaaattcagacttcaagtttagaaagttgtatatacatgtggttagataaatatttgaaagaaaaaaatacaaagcgtgattctccccattccctgccccccccacaattttttttaactttggtttcccccaccccccttttattttcaaagtctcttcctgctcctaacaaacaggctttggtctgcagcaaggcctaggcatgactattcaaacagagggagaggagacagacagctgaatggctcagcttctctctggtggtggtttctggctggatagaataagcctgacgaaacctagctattgtaagctagtttcttcagttattcttttccctatccctgtctaagctagatatatacagagaggtccagttttatgaatgcttattagatggaattttataagtctaatgcagtatcagaatagcaaatatgtgtattgcccagtttaatttactgaggtcaaattatcatgggcacttggctatcccctcctacccatgcacttatctgtaggtgtgttatcaactgatgattttctggagtttttgacccattaccatttaagatatacagagaattttatggtagtttagcccactattctgagctaaacaggtctaactcagaacttctatattttaaaaaaaaagattatttgtattacaaggaaatccttaaattattgacaggtatttaatttgcccagtaaggtgagaagtaccatattattcccttatactatataatataaagagaacaggtattcaaactggaatacaaaagtaatgaagcctttttatgcattgcactcatcattccctccttcagaggtggtgacctgcagccatgatggaaagttctctctgcccctctgccctctgaggtcatgtctggatctgtgccattagaacttgggcctgttgggagaggaggcggaggcctgaaagcagtttacataaagctttcagtaatggttggtttttaaacaggcttgctatgtgctggtagcttctttgtgcatcttgcctagacaattaaaaatatttgctccatgtccccttgcatttctaaaccaaattaattggctaccattagaataacttagactcttcatcccacccccactcatccaagtgaggggagagggaaggtacccgagtctgtttcttgttactcaacatcagtgcttgttttgggcccctttgtttgctgccttgtaaaaaatcaaaagagggagaaaacccaccaaaatggcagaattctgaccaatgtcctacaagatcctggaaagtgaaggcttctacctcatagacaggggtgcaattttcagctgagtcaccagggccttttttcacttcctgtcaagcgatggtctcttaaatgttcccttcaggtaagttctttgattcccataattttataatagtcatccttaggctaccacttccctttccactgggatattttttatttttccttttttttgtttgaactacacactgttaaactaaaagtattgaatttattttgttttgttttttaacagaagctttgatatcagctgcagatcactcaatacatggccgagacaaatctacattggccggaagcagctctagatgagcctcttggctagacttagtccctccttattagtgattggcgattcaggccatgtcatagggcctttcagacaaaaggttcttatcccagtcagctggccaaaacattaactttggatttcttaccctgctacagcatcttctagaaaggcagcaagataatattgtggcagtgcacagataacatcagggtagacttgactggagaaaaccaaattctgcgcttgctcctgtgtgcccccatccagctgtgcatgcacacacaggacacctttctagtatgaagaacttgcatcatgtctgccctctattgagcacccccttctagaaatacttccaagtattagcatgtgaactgttgactccaccctggtgctttctgctaggaaagcacacttaacgcatccagtgtagtaattgaacttgttctactgccatggtcatatgcagtgggattgcataaggagcattatcctagctctgaagataccatggagtagaattccccaccccctgtcttacatccaccctggccctgtaaattcttttttcctttgttgcgtcaacgaccctagccggagactcaagctgccccctgtgataagtgccttctcgtctttctgg

SEQ ID NO: 380 - DNA, 4644 bp, Homo sapiens
  misc_feature: Incyte ID No: 1328695.1
  unsure 2915, 2925, 2927-2929: a, t, c, g, or other
ggagaaagggcgcgggagtgagagagggtgagtcagccagctgtctatgcaataaagggaggcctcaccgcgggatagggctgaattcagaagtgcggcccgtgccgcagtctgttccaggacgcggcttgtcttagcgtcagcgagggaaggttgaggaggagccagagcctggtcctgcagcctttctcgccgtcagcgcccgtcgccatctccaccatgcagtcccgggaagacgtcccgcgctctcgccgcctcgccagtccccgtggtgggaggcggcccaagaggatttccaagccctcggtttcggcctttttcacgggtccagaggagttaaaggacacggcccattctgcagccctgctggcacagctcaagtccttctacgacgcgcggctgctgtgtgatgtgaccatcgaggtggtgacgcctggcagcgggcctggcacgggtcgcctcttttcctgcaatcgcaacgtgctagcagctgcgtgtccctacttcaagagcatgttcacaggtggcatgtacgagagccagcaggccagcgtgaccatgcacgatgtggacgccgagtccttcgaggtgttggtcgactactgctacacgggtcgtgtgtctctcagtgaggccaatgtgcagcgcctgtacgcggcctccgacagtgctacagctggaatatgtgcgggaagcctgtgcctccttcttagcccgacgtcttgacctgaccaactgcaccgccatcctcaagtttgcagacgccttcgaccatcacaagcttcgatctcaggcccagtcctacatagctcacaacttcaagcagctcagccgaatgggttcaattcgggaggagactctagcagatctaaccctggcccagctgctggctgtcctacgcctggatagtctggacatagagagtgagcggactgtatgccatgtagctgtgcagtggctggaggctgctgccaaagagcggggtcccagtgctgcagaagtcttcaagtgcgtgcgctggatgcacttcactgaagaagatcaggactacttagaagggctgctgaccaagcccatcgtgaagaagtactgcctggacgttattgaaggggccctgcagatgcgctatggtgacctgttgtacaagtctctggtgccagtgccaaacagcagcagaagcagtagcagtagcatctctcttgtatctgcagcagaaaatccaccccagagactgggtatgtgtgccaaggagatggtgatcttctttggacaccccagagatccctttctctgctatgacccttactcgggggacatttacacaatgccatcccctttgaccagctttgctcacactaagactgtcacctcctcagctgtctgtgtgtccccagaccatgacatctatctagctgctcagcccaggaaagacctctgggtgtataaaccagctcagaatagttggcagcaacttgcagatcgcttgctgtgtcgtgagggcatggatgtggcatatctcaatggctacatctacattttggggggacgagaccctattactggagttaagttgaaggaagtggaatgctacagtgttcagagaaaccagtgggcattggtggctcctgtccctcattccttctattcctttgaactcatagtggttcagaactatctttatgctgtcaacagtaagcgcatgctttgctatgatcctagccacaatatgtggctgaactgtgcttctcttaaacgtagtgactttcaggaagcatgtgtcttcaatgatgaaatctattgtatctgtgacatcccagtcatgaaggtctacaacccagctaggggagaatggaggcggattagtaatattcctttggattcagagacccacaactaccagattgtcaatcatgaccaaaagttgcttctcatcacttctacaaccccacaatggaaaaagaaccgagtgacagtgtatgagtatgatactagggaagatcagtggattaatataggtaccatgttaggccttttgcagtttgactctggctttatttgcctttgtgctcgtgtttatccttcctgccttgaacctggtcagagttttattactgaggaagatgatgcacggagtgagtctagtactgaatgggacttagatggattcagtgagctggactctgagtcaggaagttcaagttctttttcagatgatgaagtctgggtgcaagtagcacctcagcgaaatgcacaggatcagcagggttctttgtaaatagtattttgagacactaagatgtttctactgctacggaatgtattttaaacacatatcgtttctttttcttggaaaaaaagttgattaggaccacagatttggtttagaaagggtaatattttgaaatactacaaggtttagacagtccatgaaatcgacctgtttaataatttaccatcctgaaagtccagaattaaaatatggaagcaagaactatataattgattaggatgcttggtaggtttttttcattgttcaaatattcattgcacagtggattgttttgattagttagtatgctttttttttaattaattcagtcttctgttaatttttaagttttggttagtgccacaaggaatttaactttttgatttgtataatagaaaactgaactaggaattgttagcggggttttgaaggatgtgtactttccttcaaaataaagtggtagattttcaaaattttacactagtcagttctttatattctaagttaaatgtagtttgtaaaattattttggttttcttctacaaaggaaaaaattggatttatatatataaggttactgcataatgatttcattttgataatgtgcagaatggcctcataagctcacagaaagtaaaaaaaaaantgcctccgangnnnaaatcaggattccactgttttaaaagaaatctcagtttttattttggaatataaaatgtgtatttggtatatgtgaccaattttctatcccaaaaaacacccattcttagtaatgtcatgaattaaacacccttctaaaccaaaaaaaaaaaaaaaaaacggtaacttgctttttatgtttgtgtttttaatttatgcccaatacatgctttactgactcagaggaacaattcctggacatataattgggtaatgcaaatttttatccactggtcatgatttgtcttaaaatgtttacttgcctccctaaaatattttggctgtgtaggtttggtgtttgtccctagaggattcttcaacagaaagtgatttattctttactgtttggtgaggtaatatggtttagaacatatgtataagctaaaaacagtattttactcagatcagtagttatcgtgtctatcagctataaaaaaaatcaactgccagccaagaactttaaaactttaagctgtgtattatagaaccgttttgtgtagcattggaatattgtccattttgtaagtcattgtgaatgttcttaattatcagcttgaaggtatttttgtattaaaagttgacattgaagaacctaagtggatgatgggatttggggccagtagtgaaagtatgtttcctctaaaatatttccctaaacagtggtatacatggttattttattatgagatttgtatatgttctgtgtttctctgtgaacaatgtttcagtctctctgtcaccatatgtaaggggaagtccacaaatatagactacattgcacaaaactaaaattgttaattacaagaaaatataggtgcttaccttttgaaggtttattaatacatatggttgtcacaatacgtatatatgataaatggtgtacatatacagatgtttatggtgtataaatttttctatacccaattagaattatcttcctgattctttattcaataacatgctaattcctcttctatgttctatagtgacagaatgctaacttttcttataccctggcagaggacagaggagtctggtctaggatggggaactgaatttttgaacgaaaaggaaagagaaaggatgaaaaaacaaacaaacaaaaaaacacacgataatgtttcttagtcattttgattggccatttgaacagtctacaagtttaacgttatttccagtgaagtaggatggctgacctagcaatacatgtttcttcaaaagggtaaacatgctttagtgacctaaagctaaattttgtacatttgacatcagggatgttataagtactgcacttaatacaaagctatttctcaattgtgttatttttgagacaaatttttcttcaccattaacttcttgttggtagctttttgttttgtaaaaattgagagatggcaatgcttatctcaaccagattatccatctgcagaattaaggtatgcaactggtaaataaaagacaaatgctccagtttgtctttctcaacctttgagttcttaacctttgagttaaaacctagtctaaatagtgggaatgtcttggtttacagtaaggttttcttgggaaggatcttggttttgtgatctatttgtgaattaaggagtagatgttaaccattattttatagataagtgatttgtacatggttagttataaataaaactggtactagaaaa

SEQ ID NO: 381 - DNA, 283 bp, Homo sapiens
  misc_feature: Incyte ID No: 1379080.1
ctttcccttgatcaattagtatgtccagctgagatcctggataggatctcacaaggtgggtagcatcataagccttccatttactttgatctgttcccaaatatccagtcccttacattatttaacaatgtacactgttaaaaataaaaataaaaattcaaactttgggggtttctcagcagccgttaattgtacattttgcactaactctgggtgttgcgcatcttgtaagattgcgctttgtgcttcagtatgttacctttgtagacttatttaatgaaac

SEQ ID NO: 382 - DNA, 1423 bp, Homo sapiens
  misc_feature: Incyte ID No: 257904.21
agatggggatgccgaactttgttatgggtgaaatgtcaggcactgtagcatttttttctaaaatggtgatttctcatgtagacactatcataatcttcatgtatggtgctttatcttaaaaatatttcatggctctttttttttctgttgagttaaaagtaattatgcttgtgtattccacagaaagtattaatatttaagcaaatttgaatatcacatgggataataacaaatcttagtgtttagaggctggcacttcctagtctagttctgccattaaaagactgagtatctttggcccaaattcagggtaaatcttaaaagtggcgtaggacttcggtcaactaaaatcttcagaatgtcctcaagtttatattaaagtaatctctttggaagaaatatttcagatctgtatgaaataccaaataaaatagattatcttaaaagtgaacagtaatattaaaagtagtatgagaattctgctttttctttgtgttagctgtgctccattgaagtgacttgtgaatcagccagtgtgatggctgcgacactggctaatggtggtttctgcccaattactggtgaaagagtactgagccctgaagcagttcgaaatacattgagtttgatgcattcctgtggcatgtatgacttctcagggcagtttgctttccatgttggtcttcctgcaaaatctggagttgctgggggcattcttttagttgtccccaatgttatgggtatgatgtgctggtctcctcctctggataagatgggcaacagtgttaagggaattcacttttgtcacgatcttgtttctctgtgtaatttccataactatgataatttgagacactttgcaaaaaaacttgatcctcgaagagaaggtggtgatcaaagggtaaagtcagtgataaatcttttgtttgctgcatatactggagatgtgtctgcacttcgaagatttgctttgtcagctatggacatggaacagcgggactatgattctagaacagcactccatgtagctgctgcagagggtcatgttgaagttgttaaatttttgctggaagcctgcaaagtaaaccctttccccaaggacaggtggaataacactcccatggatgaagcactgcactttggacaccatgatgtatttaaaattctccaagaataccaagtccagtacacacctcaaggagattctgacaacgggaaggaaaatcaaaccgtccataagaatcttgatggattgttgtaatggtctcaaatcccaagatttaaatcacttacctatttaattgtggaaaatgattatgaagaacatgtgtatttctatctggtagtgatgtatattttacatttgtcatttcagtgttactggagttttcttcattgtgcacacaggacaaatctgatctct

SEQ ID NO: 383 - DNA, 2863 bp, Homo sapiens
  misc_feature: Incyte ID No: 1135582.19
ggcagggcaaaaccagtgagcaaggcagaaaattcctgaaattctccactgaggcccagctgttcctctccttgaaaagtcaaggcttggttcaagccagatagcacctgaggacagaacatatcagatggagaaggaaaggcaagtgacttgtccagagccactctgtcaaaaggggacttgagtcctcagggctgttgactccaaagctgacaagcaggtggcattcttcttcagagcagggcaagtgtaattctggaccaatgtgtgattctgagaccagaccaaccaactgaaggagccaagttacaccctgtttaaccctgccttcaaagggacgactctgtaagattctctgctacttattcaagttgacacgatgcccttcacactccacctgaggtcccgccttccctctgccataaggagtttgattctacaaaagaaaccaaacatcagaaatacatccagcatggctggagagctccgaccagccagcctggtggtcctgcccaggtcccttgctccagcttttgaaagattctgccaggtcaacactggtcctctacccctgctgggccagagtgagccagaaaagtggatgctgccccctcaaggtgctatctcagagaccaggatgggccatccccagttctggaaatacgagttcggtgcctgcaccggtagcctggcttcgctggagcagtactcggagcagctgaaggacatggtggccttcttcctgggctgcagcttctccctggaggaggccttggagaaagcggggctcccccagaagagacccagcaggtcacagccagacaacagtgccttgtgttacccatgctggcttctgctgccctctggtggtcacgatgaggcccattcccaaggacaagctggaagggctggtgcgggcctgctgctccctcggaggtgagcaggggcaacctgttcacatgggcgacccagaactgttgggaatcaaagagctttccaaacctgcctacggggatgcccatggtgtgtcccccaggggaggttccagtgttctggccttctccgctgaccagtctcggagctgtcagcagctgtgagaccccactggcttttgccagcatcccaggctgcacagttatgactgacctgaaggatgcaaaggctccacctggttgtctcaccccagagagaattccagaggtccatcacatttcccaagatcctctgcactacagcatcgcgtcagtctctgcttctcagaagatcagagaactagagtctatgatcggcatagacccagggaaccgggggattgggcacctgctctgtaaagatgagctgctgaaggcctctctctcgctgtcccatgcccgctcagtgctcatcaccactgggttccccacacatttcaatcatgagcctccagaagagacagatggcccaccaggagctgttgctctggttgccttcctgcaggccttggagaaggaggtcgccataatcgttgaccagagagcctggaacttgcaccagaagattgttgaagatgctgttgagcaagctcagaacaactccgttgtaagctgcatagcttgatttcatagacgaagagactgaggctctgagagatccaggggatttcccaggtggaaatggtgttctgaagacgcagatcccgatattaacttaccaaggtggatcagtggaagctgctgatggcattcctgtgcaaaaatggggacccgcagacacctagatttgaccacctggtggccatagagcgtgccggaagagctgctgatggcaattactacaatgcaaggaagatgaacatcaagcacttggttgaccccattgacgatctttttcttgctgcgaagaagattcctggaatctcatcaactggagtcggtgatggaggcaacgagcttgggatgggtaaagtcaaggaggctgtgaggaggcacatacggcacggggatgtcatcgcctgcgacgtggaggctgactttgccgtcattgctggtgtttctaactggggaggctatgccctggcctgcgcactctacatcctgtactcatgtgctgtccacagtcagtacctgaggaaagcagtcggaccctccagggcacctggagatcaggcctggactcaggccctcccgtcggtcattaaggaagaaaaaatgctgggcatcttggtgcagcacaaagtccggagtggcgtctcgggcatcgtgggcatggaggtggatgggctgcccttccacaacacccacgccgagatgatccagaagctggtggacgtcaccacggcacaggtgtaaccgtccatgttccgtgtgagcagagtccctaccaacgggcaggtctgcatccggggagaatgcagctgcttctggcgacaatcctgctagtaaacactggtcttcggtgagcaacgaacactcgcctggcctgggaaactgcatgcccactttctgggaggggttagtgcaggtgccgtggacaaaggacaacatttctctggggctttttaacttttattcctaagactctaaaggcgttgatttcaaccctccttcactctggcttcttcaggcaacccacgtggtctcctgtgagaatcttctcgacagttacttatggggacacttgtgaacaattaactgccaggcagagcatgagaacaaacattcccaggccatgtaggataggatactccagactccagtcatcctcccccatccatggtttctgttactcatggtttcagttactcatagccaactgcagaccgaaaatactaaatgaaaaatttcagaaataaacaactcttaagttttaaaaaaacaaaaagggg

SEQ ID NO: 384 - DNA, 819 bp, Homo sapiens
  misc_feature: Incyte ID No: 203728.1
gggcagtgggcgccatcttcttctgggctcactgagggtctacctgttttggggaggctgctgcgacgaagagttccctcagcctccggccttgtgtgtccgactcggcagcagtgcttccatgtggtggtgtatgtgcgcttcccagggatcttgagagtgaagatctcgaaggatttcatagttaagttgcttttacagagttaaacaggtctccaagaaattttaaaaaaggtcattattgctgtggtttgagctcagcatggctgtagtcatccgtttactggggcttccttttattgcggggcctgtggatattcgtcacttcttcacgggattgactattcctgatggaggagtgcatataattggaggggaaattggggaggcttttattatttttgcaacagatgaagatgcaagacgtgccataagtcgttcaggagggtttatcaaggattcatctgtagagctctttcttagtagcaaggcagaaatgcagaagactatagaaatgaaaagaactgatcgtgtaggaagagggcgtccaggatctgggacatcaggggttgacagcctgtctaattttattgagtctgttaaggaagaagcaagtaattctggatatggctcttcaattaatcaagatgctgggcttcatactaatggtacaggacatggtaatttaaggccaagaaagacaaggccattgaaggccgagaatccttacttgtttctacgaggtttgccttacctagtaaatgaagatgatgtacgtgtctttttctctggtttgtgcgtggatggagtaattttctt

SEQ ID NO: 385 - DNA, 1782 bp, Homo sapiens
  misc_feature: Incyte ID No: 1098806.40
ccggcgcagtgttgggactgtctgggtatcggaaagcaagcctacgttgctcactattacgtataatccttttcttttcaagatttttattttagatgcctgaggaagtgcaccatggagaggaggaggtggagacttttgcctttcaggcagaaattgcccaactcatgtccctcatcatcaataccttctattccaacaaggagattttccttcgggagttgatctctaatgcttctgatgccttggacaagattcgctatgagagcctgacagacccttcgaagttggacagtggtaaagagctgaaaattgacatcatccccaaccctcaggaacgtaccctgactttggtagacacaggcattggcatgaccaaagctgatctcataaataatttgggaaccattgccaagtctggtactaaagcattcatggaggctcttcaggctggtgcagacatctccatgattgggcagtttggtgttggcttttattctgcctacttggtggcagagaaagtggttgtgatcacaaagcacaacgatgatgaacagtatgcttgggagtcttctgctggaggttccttcactgtgcgtgctgaccatggtaagttagcttttctgttacaaggtagttgggttaggattttctgggctcacaccagtagcagaaattttgggcatcctgtctgtaaagcagttcttcacagcagttctgctgatacttactaattgctggtctcaactgcatatactttttaccctgttacacgcttgtaattgactcttctaggtgagcccattggcaggggtaccaaagtgatcctccatcttaaagaagatcagacagagtacctagaagagaggcgggtcaaagaagtagtgaagaagcagctcaaggaatttgatgggaagagcctggtctcagttaccaaggagggtctggagctgcctgaggatgaggaggagaagaagaagatggaagagagcaaggcaaagtttgagaacctctgcaagctcatgaaagaaatcttagataagaaggttgagaaggtgacaatctccaatagacttgtgtcttcaccttgctgcattgtgaccagcacctacggctggacagccaatatggagcggatcatgaaagcccaggcacttcgggacaactccaccatgggctatatgatggccaaaaagcacctggagatcaaccctgaccaccccattgtggagacgctgcggcagaaggctgaggccgacaagaatgataaggcagttaaggacctggtggtgctgctgtttgaaaccgccctgctatcttctggcttttcccttgaggatccccagacccactccaaccgcatctatcgcatgatcaagctaggtctaggtattgatgaagatgaagtggcagcagaggaacccaatgctgcagttcctgatgagatcccccctctcgagggcgatgaggatgcgtctcgcatggaagaagtcgattaggttaggagttcatagttggaaaacttgtgcccttgtatagtgtccccatgggctcccactgcagcctcgagtgcccctgtcccacctggctccccctgctggtgtctagtgtttttttccctctcctgtccttgtgttgaaggcagtaaactaagggtgtcaagccccattccctctctactcttgacagcaggattggatgttgtgtattgtggtttattttattttcttcattttgttctgaaattaaagtatgcaaaataaagaatatgccgtttttata

SEQ ID NO: 386 - DNA, 289 bp, Homo sapiens
  misc_feature: Incyte ID No: 478961.1
tctttcctctgtcttcttcattcttctgtttagcttatctgttgagttttttattttggttatttatatttttaagttctaaaatttatatttgattcttctttataacttttttcctttggtgagagtttcttttgcagagactttcttgtttttttgtttcaaacatattcataattgttcattgcattattcacaatagcaaagacatggaatcaacttaaatggccatcaatcgcagactggataaagagaatgcagtacatacatgccatggaatactagccgt

SEQ ID NO: 387 - DNA, 703 bp, Homo sapiens
  misc_feature: Incyte ID No: 205723.6
ctccggacagccctaaccaccaccatctcttccagggatggaaccctagatggaccccagatgtaaccagctcagctctccctagcctgcctctctaggtttttcaatacatttcttgaatggctacccaaaagctgaccgtccagcccctgaccacacttgttcctagtgcagggagctcagacagggccttccatctagagcccagcacctagagccaggctgcccagattcaaatcctgactccgccacttttcccactgtatgatcttgggcaagtcacttcacctctctgtgccttggtttcctcatttataaaatgtggattacaggcgtgagccaccgtgcccggcctaaataaaattttgaagaggctagaaccccgcacttgtgccttgagcttactgacctcaacaccctggttccactaaaactttatttacaaaattatgctgccggtctgcaggatgtagtttaacaatttgattattttggatattaaaatattttttaagtcttgaaaatattgtttactattaccaaagtttttgaaccttcttaaattctgtaccagaggtgagtgccacaccctaacctagtctgagtttttatgtgtaaagatcataaaacgttgtaagttttctaaaacacataagctctcaataaacgttagcttatcattgtcacaaaaaaaaaaaaaatg

SEQ ID NO: 388 - DNA, 1418 bp, Homo sapiens
  misc_feature: Incyte ID No: 979241.2
cttattaacctccaaatgccactggctcagcggggtttggcctcagaaagacattttgctgataacgggtagccctgcagcagggcccacatccgtgcgcgacgtgaaagggattcaatgtggcctgttttcccttgcaatgagcgaagctttgtgggagaatagaggacactaataatgaagcttttgtctttctctatacagctgatacctatgtggttgccaatgattcagtcaaatatcaagcacttatctgcgggactccagcttcgcctccaggctattcagaaccacgtgaaccaccacagcctaaggacgctgccgggctcgggccagagcagtgctggcctggcagccctccgaaagtggttgcagtgcactcagttcaaaatggcccaggtggagatccagtcctcggaagcagcctctcaattttatcctctatgagtggactcctcggcgctcagtgtcaacactctggtttagcaataatgggtttaaaaacaaacaatttgatccaagcaggttggggaacatattggtactgtacattctctttctagtttagtaaaagatgtgcaaaggccagagagggccgaaaatgaagctttcttgctacacatatttctgatgactccttgggctatctgattaagtgtttccttacattattttttaaaaaccaaatcatttttctttaactaacttctattttttttaagaaaaaaaaatagactggtgggtactcacagaaaagttgtataagtccccctgttgctatttttgatgatagagaataaatagggtttttgaaacctttgtagtgttttttcttaaaatccactcttggcaatgcaataaaaaaaaccgtcaccataagccagtgacacctgactgaagctttttgtctttatcctgggaaaagtggcagcttgcaaggaacattacaaagtgcacttagaaattaggtggttaaactgtgccaattgttttcgttgttttataatatcattttccaaaactgtccagtaagttttattatttttaaaactagtttttcaactcattagttctaggctgtactctcttgtaagctttatgataaccactttagttttgtgaataataaattttattcttttgttaatacttgtatacaatttaattgaaaactgtagcttgcacactggaccagatgagtccctcactggcacagtgccctgcacctggagtgatgtttcataaaacggaattttaatagtgtaagagcaccaagatttctctgcacctatacctagcgttggactgtgcattccaaatgaaattcctcctctttatccctgtaatgcactgactaacagaagacttactacacatttaaactgtatattgacatgctattaaatgcgttttttatt

SEQ ID NO: 389 - DNA, 1991 bp, Homo sapiens
  misc_feature: Incyte ID No: 200119.1
  unsure 1988: a, t, c, g, or other
atggagtgctccaaggtcatgcatagcagtcccagcagccccagctctgacgggaagcagaagacagtgtaccagaccctgtcagccaagctgctgtggaagaagtacccgctgccggagaacgcggagaacatgtactacttctcagagctggccctgaccctcaacgagcacgaggagggcgtagcgccaaccgacagccgcctgcggcccgaccagcggctgatggagaagggccgttgggacgaggccaataccgagaagcagcggctggaggagaagcagcgcctgtcgcggcgccggcggctggaggcctgcgggccgggcagcagctgcagctcggaggaagagaaggaggcggatgcctacacgccactgtggtttgagaagaggctggatccgctgaccggggagatggcctgtgtgtacaagggcggctactgggaggccaaggagaagcaagactggcatatgtgccccaacatcttctgagcgccacccttgcaacaaatacaggcgcctgcacagcctggcccacctgttcattaatgcactcaatttagtactgaatggtctttctcccagcccattcccagcccttcctatttcctttcctattttttttttctccccacactttcttgggactcccaccttggaaggaggaagggctgacctgggttctctccagcccccaggtgcgccgggtcacccgtgccccttcattatggacctgggccctaccggaacccctgccccagttaccacaactcaggccggctggcccgggccatgggctgcgcaaatcaccagcccccaacccagggaggaactggcccctcctagggagcctcttcgacttttttagaaaaatgatctccatttctttccagccatgatgtttagtaaatatttttagtaccgcacttagcagacagctttccaagtgtgctttcttgccacaaaagtgtcctggcaagagccccttatttttaagacatcaggaagccagaccgctttgagttgggagaattttgtagctcaacatatcaagtcctcgatggtatctgagctgcccacacccccacctgccaaggccccacagagcccaaaacagaagggggctgccccagcccagcagagcacagagtttctggagctcccatccacagatgcaggagggggtactgatggtaacccccatgtggatttgagggcagcagtccctggcctcaccctagccagcctgggtggctccctagccccaagaggccaggaagggctggaaggcagggcctgcaggtgctccccgccctgagacccaggccccaaatcagcaataatgaacaaacccttggcccagcctgggctggtgacctgggcaccagagaccttgcatccctcctcatcctaggaggcccctaggggtgccccatctcagtgtcccctgaactctttatttgcctaatttatatatatatatatgagatatataaatatatataaaatagctattttgcttaaatttctacagtatgtaaaagtgaaaaaatgatgaagacgggtgcacctgtctgagtttggccctcatgtgagctgtgcccttccctctcctcatgcccccttccagcggcttctgccaaccatggggggctggaccaccatggccactgacccagcccctcagaatcccacactccaatcctttccatttcagtttagtcctaaaagttcatcacagggtctttctttctactccaggactggttttgtttttatatatataaaaaaaaaaagtgaaaacaccaatgtgtgaaatgccttacaatgcccactggagaggcggggcggggtggggcaggatggccccactagggctcctacagagctgtggaatgtacctctccccaacactgttttgttagcgagcaccttttgaccagtaataaaaaaccttggctttggagttttccaaaaaaaaaaaaaanggg

SEQ ID NO: 390 - DNA, 2389 bp, Homo sapiens
  misc_feature: Incyte ID No: 1270681.1
  unsure 1021: a, t, c, g, or other
gagcagctgccgaagtcagttccttgtggagccggagctgggcgcggattcgccgagggcaccgaggcactcagaggaggtgagagagcggcgggcagacaacagggtgaccccgggccggcggcccagagccgagccaagcgtgcccgcgtgtgtccctgcgtgtccgcgaggatgcgtgttcgcgggtgtgtgctgcgttcacaggtgtttctgcggcaggcgccatgtccagaaccgggctgggggatgtccgtcagaacccatgcggcagcaaaggcctgccgcccgcctcttcggcccagtggacagcgagcagctgagccgcgacatgtgtatgccgcctaaatgggccgggggcttgccattccacagggaggcgccgctgaagcgaatggaacttcgactttgtcaccgagacaccacttggaagggtgaattcccctggggagcgttgtgcggggccttgggctgggccacagctctagcttcccacggggccccggcgaggccgggatgagttgggaggaggcaggcggcctggcacctcacctgctctgctgcaggggacagcagaggaagaccatgtggacctgtcactgtcttgtacccttgtgcctcgctcaggggagcaggctgaagggtccccaggtggacctggagactctcagggttcgaaaacggcggcagaccagcatgacagatttctaccactccaaacgccggctgatcttctccaagaggaagccctaatccgcccacaggaagcctgcagtcctggaagcgcgaggggcctcaaagggcccgcctctacatccttcctgccttagtgctcagtttgtgtgtccttaaattattatttgtgttttaatttaaacacctcctcatgtacataccctggtccgcccctggccccccagcctctggcattagaattatttaaacaaaaactaggcggttgaatgagaggttcctaaagaagtgctgggccatttttattttatggaaataactagttaanagggccttccctccatcgccgtggttctccttttcctctctcccggaggttgggtgggccggcttcatgccagctacttcctcctccccacttgtccgctgggtggtaccctctggaggggtgtggctccttcccatcgctgtcacaggcggttatgaaattcaccccctttcctggacactcagacctgaattctttttcatttgagaagtaaacagatggcactttgaaggggcctcaccgagtgggggcatcatcaaaaactttggagtcccctcacctcctctaaggttgggcagggtgaccctgaagtgagcacagcctagggctgagctggggacctggtaccctcctggctcttgatacccccctctgtcttgtgaaaggcagggggaaggtggggtcctggagcagaccaccccgcctgccctcatggcccctctgacctgcactggggagcccgtctcagtgtttgagccttttccctctttttggcttcccttggaaccttttgaggagccccagcttacccttcttctccagctgggctctgcaattcccctctgctgctgtccctcccccttgttcctttcccttcagtaccctctcatgctccaggtggctctgaggtgcctgtcccacccccacccccagtctcacatgtgacttggaacgggcgaacgggagtcacacaagaacgaacgggcaccctagtttctaccctcaagcagctcaacgcatgcgaccgccccgctcctctagctgctgggggtgatgggtccccatcgtggtggcatcatggcccccttgagtaggggttatctctgtcgttacggggtatatgatgggcggagtagatctttctaggagggaagacacttggcccctcaaatcgtcccagcgaccttccctcatcccaccccatcccttccccagttcattgccactttgattagcaccgggaacagggagtcaagacattttaaagatggtggctagtagcaggcttatggactagggcattgccacggtgggctcatatggggactgggagtagttgtctttcctgggcactaaacgttgaagccccttggaggcactgaaagtgctttagtgtacttggatgtattggggtctgacccccaaacacccttccagcttcttgtaacatactgggcctggaactgttttctctgcggctccccgatgtgtacctggttcccgtttctccacctagactgtaaacctctcgagggcatgggaccacaccctgtactgttcttgtggtctttcacagctcctcccacaatggctggaatatactagcaggtgctcaataaatgattcttagtgactttaaaaaaaaaa

SEQ ID NO: 391 - DNA, 2700 bp, Homo sapiens
  misc_feature: Incyte ID No: 1168293.1
  unsure 542, 842: a, t, c, g, or other
cactagcctcctgccccgcggcgctgccgcacgagccccacgagccgctcaccccgccgttctcagcgctgcccgaccccgctggcgcgccctcccgccgccagtcccggcagcgccctcagttgtcctccgactcgccctcggccttccgcgccagccgcagccacagccgcaacgccacccgcagccacagccacagccacagccccaggcatagcctttcggcacagccccgggctccggctcctgcggcagctcctctgggcaccgtccctgcgccgacatcctggaggttgggatgctcttgtccaaaatcaactcgcttgcccacctgcgcgcccgcgccctgcaacgacctgcacgccaccaagctggcgccgggcaaggagaaggagcccctggagtcgcagtaccaggtgggcccgctactgggcagcggcggcttcggctcggtctactcaggcatccgcgtctccgacaacttgcctggtgtgcccattcaaacactgtggcagaatggacctggatttccgactggggancgagctgcctaatggcactcgagtgcccatggaagtggtcctgctgaagaaggtgagctcgggtttctccggcgtcattaggctcctggactggttcgagaggcccgacagtttcgtcctgatcctggagaggcccgagccggttgcaagatctcttcgacttcatcacggaaaggggagccctgcaagaggagctggcccgcagcttctttctggcaggtgctggaggccgtgcggcacttgccacaacgtgcgggtgtgctccacccgcgacatcaagtgactgaaaacatcccttanttcgacctcaatcgcggcgagctcaagctcatcggacttcggggtcgggggcgctgctcaagggacaccgttctacacggacttcgatgggacccgagtgtatagccctccagagtggatccgctaccatcgctaccactggcaggctcggcggcagctctggctccctggggactccctgctgtatgatatggtgtgtggagatattcctttcgagcatgacgaagagatcatcaggggccaggttttcttcaggcagaggggtctcttcagaatgtcagcatctcatttagatggtgcttggccctgagaccatcagataggccaaccttcgaagaaatccagaaccatccatggatgcaagatgttctcctgccccaggaaactgctgagatccaccttccacagcctgtccgccggggcccagcaaattagcagcctttctgggcaaggttccttccccttcttcttggttcagattgcccggagggagggggaagctttctgttcttccagctttcccgagtaccagtgacacgtctcgccaagcaggacagtgcttgatacagggacaacaatttacaacttcattccagatcccaggcccctgggaggctgcctcccaacagtggggaagagtgactttccaggggtcctaggccttcaactcctcccatagatactctcttcttctcataggtgtcccagcattgctggactgctgaaatatcccgggggtggggggtgggggtgggtcagaaccctgccatggaactgtttccttcatcatgagttctgctgaatgccgcgatgggtcaggtaggggggaaacaggttggggatggggataggactacgcaccatctttaagtccctgtcacctattcctgaccgtctttctgagtgctttctggtgggggactccggcgtcgatgctaggagagaaataccttgaacttgcctcttttacctgctgctttctccaaaaatctgcctgggttttgttccctatttttctctcctgtcctccctcaccccctccttcatatgacataggtgccatggataggaggctacaggggccaaacgctgagccacctgccctttttttctgcctcctttagtaaaactccgagtgaactggtcctcccttttgggtttttacttaactgtttcaaagccaagacctcacacacacaaaaaaatgcacaacacaactgcaatcaacatgaaaagcttgtaaatgtgtgtacagttggcatggtagtatacaaaaagattgtaagtggatctaatttttaagaaattttgcctttaagttattttacctggttttggttcttggttttgaaagatgcgcattctaacctggaggtcaatgttatgtatttatttatttatttatttggttcccttcctattccaaagcttcccatagcttgctgcccctagttttcctttcctcctttccctcctctgacttggggacccttttgggggagggcctcgacgcttgcctctgtttgtggggtgacgggactcaggcgggacagtgctgcagctccctggttctctgtggggccacctcaccctaccttaccccaggtgggtcccggccttctgtgggtgatgggagaggggcattagctgactgtgtatataaggataattactgaaaagcagttctggataggtgtgccttaccagatcctctctgggcgctgtgttttgacgcagcaggtagcctggctgggttttatctagagtgaaatactgtacaggggacataaaagagatcttattttttctttatatactataggcgtaattggcataacacccttttgtcttaaaaaaa

SEQ ID NO: 392 - DNA, 1394 bp, Homo sapiens
  misc_feature: Incyte ID No: 238434.10
  unsure 26, 65: a, t, c, g, or other
ttcatacagggctgcaggaatgagtncccagactacagcttcctgtccatgggaaaatcgagccntcccaagccaagtatttcttcaaagaccaagtgctcgtcagctgtgacacaggctacaaagtgctgaaggataatgtggagatggacacattccagattgagtgtctgaaggatgggacgtggagtaacaagattcccacctgtaaaaaaaatgaaatcgatctggagagcgaactcaagtcagagcaagtgacagagtgaatgacgggaccccacacaatgcagacatccagaaatggatcactcccaagacccctggggcccagagctgcaccacccctccccacccacaacacccccgtgcccctttccatgtggattagaatgggtgctgaacaacatgatctcagcagttgaagctgctacgtgtgtgaaagcaaattctccacttgagggtttgcccatcattcaaacactattccagaaaataatgaaaaaaaaatgtgggatttattttagcacctctgagtggactgtacttttctcaacggaaaaaaaaaatgcccttggtccttgagacaaaagatttaatatacaaccatgtggcctcaggctgaccagatcaaagtggtttctaatccattctacatgtcaagtttaaatgaaccagactgcctgtgactttatgaatctgaaggtattacctgttgctgctttcttaaccaccatgagtaggtaaagcaaataataactcacagagtgtggattttggagaatctgaatgttttctcattcacaaaagtatcccttctacccctatctggcgcagggctgaaatgtcatcattagaggttctgtcttctggggcttacaagttctatgtttcttaaaattcgctgattaaaaattttaaaaagataggtatcacacctgaaagcagtggccccagctctgtgccatgggatatcacaggtcctaaacagtgatagagaaagggctggggagtggcaactggaatctctgcttccagacaagaggggtgcactctgtggtaaagaaacgtgcactagaaaagaagctgggaattatgggtcattgttctggccctgcctccaccttgctgtggtgaccccgggacaagccctgttctactctaaatgctgtcaagtgagggtttggaccagatgcaggcaaagctccctccaggggcagaattttataatcctcatgagccaggatgtatgactctgcaaattctcagaacgatacaaattccacaatcccaaactgttcttcacactggctgtacctaaactatgcattcttaatcaattctggtggagtaatttctgtatttcctgcataaactgtttctgctttgcttgctaa

SEQ ID NO: 393 - DNA, 507 bp, Homo sapiens
  misc_feature: Incyte ID No: 475444.8
agccgtcacatttctaaacaagcatgaaaggggttcatttttgtcttcttcttgcctgccgtcagcatggtggaaatggctctgcctatgctcatgcttctggtgcccaatgccttgcactgtgccattcaacactatgaagagaaacaagtagccacacctcaaaataatgtggctgtcaactggcctaaataaacctacacaaaccagtacttgccttttgctggaaacattgattatgtgctcctcacgtagtagaaagcggtatcctgattagtctaacagttgtgttagactttagggccagtattgtcagcatttatttatttatgtacctttgttatgatgggatatttttcatttgaaacttgttcataaaaatgtcaatgacattgatgactgatttgtacatatttttcatatagttttgtttaaaaaataattcatgcaaaatcttgaagtcatttttgctattgaaataaaccttaattaaaatatttcatcatc

SEQ ID NO: 394 - DNA, 3195 bp, Homo sapiens
  misc_feature: Incyte ID No: 201572.10
agaagcctccacacttgcctggctgtatactctgtcagtaacacatgtgagtgtggactccataaatacaaatgtttagaaattttgtgtgagctattctcagtctacatattaaatattagtgaaacttaattttttaattttttggtataaaaaatacaaatacaataaaatatatagagagacctgtaagcatttctgttgttgactgttgaatctaaagagcacaatagcaacatctgtgctaaaccagctattacatattgaatgtcctttgtatatattctttattatcatagctccaggtgctccttcagctccaaggagagggcgtgggggtcatcggggtggcaggggaagatttggtattcggcgagatgggccaatgaaatttgagaaagacttggacttgaaagtgcaaatgcacaattcaacaaggaagagattgacagagagtttcataataaacttaaattaaaagaagataaacttgagaaacaggagaagcctgtaaatggtgaagataaaggagactcaggagttgatacccaaaacagtgaaggaaatgccgatgaagaagatccacttggacctaattgctattatgacaaaactaaatccttctttgataatatttcttgtgatgacaatagagaacggagaccaacctgggctgaagaaagaagattaaatgctgaaacatttggaatcccacttcgtccaaaccgtggccgtgggggatacagaggcagaggaggtcttggtttccgtggtggcagagggcgtggtggtggcagaggtggtaccttcactgcccctcgaggatttcgcggtggattcagaggaggtcgtgggggccgggagtttgcggattttgaatataggaaagacaacaaagttgctgcatagtctacaaacaagtctctgaaaataggtgaatttctagctcttcatggtcctgaacattgatttcagtctttgcaaagaatgaagaagtgaattcgctgtacatttgtcaccagcactgggtttttgttttttgtttgtttttccgcttaatttcaaagataaaatgcagttacttttgggggtggaaggctcatcttaaaacatgagcattaaatatatttggaatagcagaaggttaagtaatttcttatgtatagttaaactaaagcagtacttcagtgggacttaacaagtattttttcatcactgaaaggttttttttttttatcactaaattgtatttggcaattgcaagttgcctgcagatagggccgtgatactgtgttttgagccacagaaggttgtgtgtctgtctgttttgtgtgtgtgtgtgtgtgtgtgaatgtgtgtgtctttttcctcctttcttttggggaatcctgtaatatgaggtagcttatttcgtcaattaattagggtgctggatggtagagaattttgtcagtcaactatgtacacacagtaaatactgtttcttaggcaaaggtaacttttttatatagttgtaaaattccattatattccattgccaaagaaacattaagaactttgtatagctgtataaaaagcaactaattttttaaagaataaacattttaaagtcagcaaacatactgtgtccttgcagaagttgatgtgctgagcagcagccttatgggtgggtctttttttcttagttttccaggcttaacatttttgattttgttttttaatgtttggaacataaatgaagatttgatacattatttcattatctaaaaaggattaattattcatgctcattgtaagaacttcattttgtagcaaatggcatatcacaggatctgtccagataatcgatattttcagtatacaaatgtaaataatcacagatgagaatgtacttagctgtattttcaaataagtaatcttccccccttttgtaggactttaaaactaggcatcaatgaacctgtttttcctattatgcctggaatttagtcatgatatcatgataccttgactcattccatcatatttcaagaggattcagagtgctagaaattattttggtagcctgtaacacacggcaacactggtccttgggcctatgatgacccacagatgactcagtatagagttcattgctaattataaattactagtgaatctttttgatattttaagctctagtgggaaaaatctggccacttttgtgtttttatgaaggccatggaataaaaggatccaaagatttaaatatttttatctaatattttgattgttttcttaactttctccttaaaacattcagtagtgataaagatatagaaactgcactgtaggagaattggaatatttaaggctggttgacattttttattttcattttatatcttttgtatagctctacaaggcagtgttttgtaatttggtttcattatgaagatccagtacttggcagccatagtttagacaatattgttcagtgctgtttgcttgcatgttaacaacaaaaccttttagaggacccacaaatcatgatattgaacacagttccgaggcattcagagcatcagagcaagtaccatggcaatacatgtgtagactgttggagatgtcccgggccaatttcaagaaagaaaactgtaaatactagttctacttgctctgaaattatgagtttatgcgttttcccagccctccgaatcactgactggggcgttttgtgccccagcaataactggcagcatggcatacctgcagtaccccttacaatattaaagcaaagtttttattctaaaacagaataaaactgttcaataaaaaatgctcgtcaaagttctttctctttaaatagtaacattctgtttcagtaggaacataatgaaaggaatcttttaaatggaagagcggaattataatgtttgtattccctgtaataactataaatcagttactttatttctaagattgagttattgttgcagatgtttagggaaagctaaaagccccttccttcccctcctgtgtgtaaataaaatacttctgagatcagatccgtgacatgaggagattgagccacccaggcacaggccaggctggaaacagcagccagaacacactccctgtgggcagacgcatgaagaagatgcagaatctgtctattaaaacagttcgctccaaaagctgggctcatgtgatggt

SEQ ID NO: 395 - DNA, 720 bp, Homo sapiens
  misc_feature: Incyte ID No: 232355.18
caaaaggaaagaaaaataataatgcctggttaaagaactcaagaatgttggctatcaagacaaatagtatccacactgcagttttgtgggaatgtcctaatcaggcgtctggggatcagctgcttatttttattggaacatgatcatgctaattaatatttcattacccattataggttgtctccggatactttcatccaagagttgaatagttgtaacacagattgtgtggcccaaaagctataaagtatttactctctggcttcctggcctaatctgttgttgaaaccttgagttttagaagaagtcttcatgtttaaattctttttcttgtttttgggcaggcagagaacatttataatgatgaagaccctgaaggaagcgtggatccagaaggacaagggtcctagatatgtctttacttgttgtgattttagactccccttttttcttctcaaccctgagagtgatttaacactggttttgagacagactttattcagctatccctctatataataggtaccaccgataatgctattagcccaaaccgtgggtgttttctaaatattaataggggggcttgattcaacaaagccacagacttaacgttgaaattttcttcaggaattttctagtaacccaggtctaaagtagctacagaaaggggaatattatgtgtgattatttttcttcttatgctatatccccaagtttttc

SEQ ID NO: 396 - DNA, 1973 bp, Homo sapiens
  misc_feature: Incyte ID No: 244230.4
ggagttaaccagcagggatctcgccgtctgttgagcggctctgcctttgtggtgggcgtgctaagccctgtgtccccttaggcacccgagtgtacagccccccggagtggatccgctaccaccgctaccacgggcgctcggccaccgtgtggtcgctgggcgtgcttctctacgatatggtgtgtggggacatccccttcgagcaggacgaggagatcctccgaggccgcctgctcttccggaggagggtctctccagagtgccagcagctgatccggtggtgcctgtccctgcggccctcagagcggccgtcgctggatcagattgcggcccatccctgggatgctgggggctgacgggggcgccccggagagctgtgacctgcggctgtgcaccctcgaccctgatgacgtggccagcaccacgtccagcagcgagagcttgtgaggagctgcacctgactgggagctaggggaccacctgccttggccagacctgggacgcccccagaccctgactttttcctgcgtgggccgtctcctcctgcggaagcagtgacctctgacccctggtgaccttcgctttgagtgccttttgaacgctggtcccgcgggacttggttttctcaagctctgtctgtccaaagacgctccggtcgaggtcccgcctgccctgggtggatacttgaaccccagacgcccctctgtgctgctgtgtccggaggcggccttcccatctgcctgcccacccggagctctttccgccggcgcagggtcccaagcccacctcccgccctcagtcctgcggtgtgcgtctgggcacgtcctgcacacacaatgcaagtcctggcctccgcgcccgcccgcccacgcgagccgtacccgccgccaactctgttatttatggtgtgaccccctggaggtgccctcggcccaccggggctatttattgtttaatttatttgttgaggttatttcctctgagcagtctgcctctcccaagccccaggggacagtggggaggcaggggagggggtggctgtggtccagggaccccaggccctgattcctgtgcctggcgtctgtcctggccccgcctgtcagaagatgaacatgtatagtggctaacttaaggggagtgggtgaccctgacacttccaggcactgtgcccagggtttgggttttaaattattgactttgtacagtctgcttgtgggctctgaaagctggggtggggccagagcctgagcgtttaatttattcagtacctgtgtttgtgtgaatgcggtgtgtgcaggcatcgcagatgggggttctttcagttcaaaagtgagatgtctggagatcatatttttttatacaggtatttcaattaaaatgtttttgtacatctcacttttgaactgaaagctggggtggggccagagcctgagcgtttaatttattcagtacctgcccagttcttatttagcatttttattccagcctacttggaaacatgtttttatttgcaatatatgcctgactgaattaagcttgcttgttttaaacaaccaaatcattggaacagaaaaggatttaaaaaacaagaatgcatgatctcagcgtgattaaaaaaaaatcagtggaaataaatgatcatagaaggtgcttttcaaaacaactgctattataattctcaaagtcctactctgccaaaagaagattaaaagtcatacattacattacaaggaaatgttcatgtgggaagagggttgctgaaaatcaacaacgcttgaagttaaaaagtgtgtctttgtagatttcattgtataatgtgtatttcttaggagatggctgacttgattgatctacgctaagtggagacatttcacatttttaaaaccaaatgttcaaatctgtattactctttgccatcttgtatgtagaggctatttttttaaatcattaaatttttagatctctgttttcat

SEQ ID NO: 397 - DNA, 2599 bp, Homo sapiens
  misc_feature: Incyte ID No: 2720354CB1
taggctaattttttttacagacacgatttcgccacgttggccaggctggtcttgaactcctgacctcaagtgatccacccacctcagcctcccaaagtgttgggattacaggcgtgagcactgcacctggccaggctcatcactttttgcgcctattgcctcgaagccagtctctgatgggacattagggcaggggcccttcagcctagtctgggacatgggccgctcactcagcagtatgacaagcatcacctggagaacgggccagtctcaggaggtcgttcatgccccactggcagtgcactgtgcagccatagtgtaaacaagaggcttaacctgaactggtctgagatcttggggaccccctaccctgtctccagcagcctgtccctttagctgtttgcctactggcaccccatcctgagaaggcatagatacccggcccaccctgccctggaattacaaaagtcttagactgtgcctgagtgcccggcctccttgggagaccctcctaggcagcctaagcaccagacccgggagctgggtgctctggtcctgcctgcctgcctctcactggaccctctccttccaggtacggcttcaggtccagagcgtggagaagcctcagtaccgcgggacgttgcactgcttcaagtccatcatcaagcaagagagcgtgctgggcctgtacaagggcctgggctcgccgctcatggggctcaccttcatcaacgcgctggtgttcggggtgcagggcaacaccctccgggccctgggccacgactcgcccctcaaccagttcctggcaggtgcggcggcgggcgccatccagtgcgtcatctgctgccccatggagctggccaagacgcggctgcagctgcaggacgcgggcccagcgcgcacctacaagggctcgctggactgcctcgcgcagatctacgggcacgagggtctgcgtggcgtcaaccggggcatggtgtccacgttgctgcgtgagactcccagcttcggcgtctacttcctcacctatgacgctctcacgcgggcgctgggctgcgagccgggcgaccgcctgctggtgcccaagctgctgttggcgggcggtacgtcaggcatcgtgtcctggctctctacctatcctgtggacgtggtcaagtcgcggctgcaggcggacggactgcggggcgccccgcgctaccgcggcatcctggactgcgtgcaccagagctaccgcgccgagggctggcgcgtcttcacacgggggctggcgtccacgctgctgcgcgccttccccgtcaacgctgccaccttcgccaccgtcacggtggtgctcacctacgcgcgcggcgaggaggccgggcccgagggcgaggctgtgcccgccgcccctgcggggcctgccctggcgcagccctccagcctgtgacgctcaccccgccctccttccccagggctccttctcagaaacctgggacataaattggcccctgagtcgattgccctgcttcctgctgggatgctgcgagctgtggagtctatcagatgtgggctgaattttgctgatcagctgggtagttttggccgagaactgcacttgcctcagtgttctcatctatgaaataaggaccctcatgcccacactgtagagtcacgaagctcagagattattcccagcagcagccagcacctggcctggctgaggccattgcaccgttatcctggaaactgaggcagacactccagcccctttctgggatcctggccacgtcattgtgctcctgccctgcaggctggctcccgggggtctctgatggccaaccaaggggccacccagggacctctaactccacacatcctccacccgggggggtggtgggccacccctctggtctgtgttagggacagaggaaaacttggtgtgcctcctggtgtcacagaactggatcctctgcataccccagcttctccacatgccactgctaggggtaccccagctgctgccactcctgctggagggtgaactggggaccctgcaccctccgggaagccatggagtctgctggaggcaccatatcagcctgcgggactagggtggggagcaaacaggccagcggtggaggtctggacagttcaagtgtgatgcagctgtggcaaggagaaatccttccgcctctgggcctcaggctgcctgtccataaaatggggacatggccagctgacggacaactgagtctccggcccacctaccaccgccagccaggatcccccaaagtgtgcagagggctcagcagagaacagtatgggaccccctcaccaggcctggaacacctccagccacaaagaagccaaaggtcagtccctctgctccccagcaaacggtgcctcccaggcattctcagtgccagggcttcatccctgtgaaggcacagggcctgctagtgggcacaggggtggctagttggggcctggggcagaggagggctgcaccaggcgtcctggggaatgtgctcagtgaagacgacactgggctttgcacagcctggtgtcgctgtacagaaactgtcaagggaataaagtgttctttgttttttaaaaaaaa

SEQ ID NO: 398 - DNA, 1526 bp, Homo sapiens
  misc_feature: Incyte ID No: 197037.2
agtaagctcttcagaatttgtctccggtatttgaaatgaattttttttaaacctcagatctgaatatattcaaacacccatatttcatcaaatctagggcatatcatatacctttaatttaaaaaaaaaggctgagcagagttgcttgtgtctgggaggctgaggtgggaggattgcttgaggccaaaagtttgagaccagcctgagcaacatagcaagatcctgcctctaaaaacaaacaaacaaaaaatgctgccagttgatcattacatttatcccgacatcagatatgtcaaattgtgaaaagcaccttaattttgatgaaatatgataggtaaaaaatagcgcaaagctaagtataagtgacttttaaattatctgctcttttggattatcactactgctactagccgttagaatattggtttggataatggaaagttgactagagctacaaaatctgtttcaaaataaaagatctgctcaaacaagaatgtgatgatcacttgctgtattgtacaacaaagtcaaactgctgttagactcaggtgacagtcaaatgttggaggctgtgttgggatgagttgttacaaagcctctttcattcttcccatgccatgtccaggagttcttctctgttaaacctgaagagatgccagccctcctcagaggaaaggtctaaagcccctcgactagtatagtagttgatagaagcctggttccaaatgacgacaagaaagtgcatgcagttacattgagttgtgatggctatctgtttaaaaacaaacaagcaaatattactttcatttgaaagtataatcttcgttaacacatatattttattgaaggtctactctatgcaagacactatgtgtgaataatacttccaaatatagtagttaccttttgaacttttctatagctgtaaaaagaaaaaagtctcactgttctgagctttaaagccctctttaaaatctcaaaactgatttgcaaagcctttatcatacagaaaaggtgtacctaaaagaacacatgttctcatatgtttccaaaatacaagaagatcttgcttttatagtcttgtaatattcatactgtgagcctgtgtttttgaataaaaatgctttctaatctccctccttcttactttcccttgatagcaaaaagggtgtatagtgtggttgtggattatatataaatcaattttaattgactataattcatatactgtatatgatcatctgatttgaaaatccagtttaatttgggtagaaatttgaagtatatgttggggttatgttcaaatggtgagattaatgatttaatttatgccctgtgaatatttattaagaaaaggttaatgtatagaatatcaatactaattgtaatacatacctgacttagcctcttcagcatttcagctccaatacctaggccttttaaatagacaatgcaaagtgaaaactgcaaatttcacttaacttgttatttgctttagtttaaaataaataatatctaaaactctg

SEQ ID NO: 399 - DNA, 833 bp, Homo sapiens
  misc_feature: Incyte ID No: 988704.22
gcgccagagctgctaagtgcgtcagttgtggagtggccgtagacgagttaagtcctggtctgcgtggaggtcgacgactccgtcgcagactacggacctgtctgggtctcagccgccaaagaccccgtccggtaggaagtactagccggacatcatgagtggctgtcgggtattcatcgggagactaaatccagcggccagggagaaggacgtggaaagattcttcaagggatatggacggataagagatattgatctgaaaagaggctttggttttgtggaatttgaggatccaagggatgcagatgatgctgtgtatgagcttgatggaaaagaactctgtagtgaaagggttactattgaacatgctagggctcggtcacgaggtggaagaggtagaggacgatactctgaccgttttagtagtcgcagacctcgaaatgatagacgaaatgctccacctgtaagaacagaaaatcgtcttatagttgagaatttatcctcaagagtcagctggcaggtttgttgaaatacagttttgagttattttgatgtggctttttaaaaaagttaatgggtagctaatgttgtattgttttattaaaagtagttttaaattaatggatttaatggaattgtaattttaaacatttaattaaatgtaatttgggggatattttgaactttaatattagtgatcaaatgtaaatgttttgaggatatttttcttgttttttaaaatcaatttttaaccaaatattaaaccctttatttgccagcctgtctgtgtcgttgggcttatgacgaggagtgcctgtgggttatcctaatcg

SEQ ID NO: 400 - DNA, 708 bp, Homo sapiens
  misc_feature: Incyte ID No: 995526.6
  unsure 5, 7: a, t, c, g, or other
acctntntgagtgatgacccttccttaataccttgatgtgtgaatatttgagaggtcataagcagtggttttggccataccgtattataccatatacatcagtaagagctcatcttggaacctgttttgcagtttcaaaaattaaagacctacatcacacggttgatgtgaagaaagctttatttttcaaatgagtatttaatgaaagtatacataaccaatgttgggtatacagatgcttctcaacttatgatgggtttaggtccagataagcccactgtgagttgaaaataccaaaagtcaaacatcatagcttagcctaccttaaaagggctccgaacactacattagcctacagttgggcaaaatcgtctaatacaaagcctattttataataaagtatgttgaatagtctcatgtaatttttgaagattacattgaaagtgaaagaacagaatggttgggtacttgaaatacagcttctactgaatgaataattctaaagttgaaaagtactagtaagaaccatcataatgtctgtgttcttctagtaaaggtgaagtgatgaaagaatgcttttttcccacccaaaaaactatgctctataaatgcagattagctagtttctgcctgtttaaatggtattattttatacattacaaaatggaaggaacttactttattaaacttaactttgatacttctctt

SEQ ID NO: 401 - DNA, 899 bp, Homo sapiens
  misc_feature: Incyte ID No: 235761.1
  unsure 718-769: a, t, c, g, or other
gaacaaataaaccacaaaacataggaaactaaatatgctctatatcacggataatcaagagaaattttgtttttgtttttggtagagatgaggtctcactatgttgcccagggtagtctcaaactcctgggctcaagtgatcctcccacctcagcctctcaaggtgttgggattacaggcatgagcccctgtgcctggccagaaatgtatttttataagacatacatactattaggttcattgcagcattgtttataatagtaaacaaatggtcccaatgtcaatttccatcagtaaggactctatttgctgtgtattcaaatcttttataacaggaatgcgtgtattttgtgtaagaaagaatagtaggctatggaggagggggtgatagcagcagagagaagcataaaagacctctttggcaggaaggatggcttccagaccagctaagtggagcaagcatgttttgaaggacactggctctaatagggagttagcatggggtgggtcacagaacgtatttgatcaggcaaagaggactcttgccatccaagcctgttccctcagataaatggggataattcatatgtcataagccaaataaatgagggaatgaaacatacgtaactaataataaaaagtgttaaaatttattgggcatttaactgagacaatctggttccagagcctgctctcaatcccaatgatgtgctacctnnnnnnnnnnnnnnnnnnnnnnnnnnnnnnnnnnnnnnnnnnnnnnnnnnnnaacatcccaggatctgttttttacctgtgtaaaaatgcatatatagtacctttttcacaagcctcaaaacgaatataggccttcctcataggattattgaaagattgagttaaacattggtttagcttag

SEQ ID NO: 402 - DNA, 1759 bp, Homo sapiens
  misc_feature: Incyte ID No: 474515.3
  unsure 80, 82, 84: a, t, c, g, or other
gaacaatgctggggggatggggaagtaagactttgtttctgaagacagatgatgggaagctggctggctggttccctttngnangggggatgtgggggagaaggcatatataggaggtctttcttcctctggttctgttggtttccaagtaacatcagaaattcctagaatatcccctcccaatgtgactatcctaagaaattgcttcccaagtcccagtgatacacctgtatgcttaaaggctaatgagacccacttttttgtctgcccagaagataagtagtatagtcaggtctcatacttttatgctgattgttttcatgcttttcaagtttttattaatgcctgtggctgtactccttatgagtgtaggagagatttactgtgtaagagagatttactgtggtgaacccagctttttttatacctagaatactttggagacttgtaagcctaccattatctactaaagaatactaattggggccagaggtccgtaaagaatggggattacgtacagatgaaaattaggtattttcagctctagttgagggtacagggataggggacaatgcaactaggctgtggttggggcatccattccttgcagtgatggtactcagcccttgtccctgagcttgctgcttcccccctaggtatgcggtgctttgtggtcagctggctgagcatgagagcatccagaggcgcatccagagtggctttagcttcaaggagcatgtggacaaagccattgctctccagccagaaaaccccatggctcactttcttcttggcaggtggtgctatcaggtctctcacctgagctggctagaaaaaaaaactgctacagccttgcttgaaagccctctcagtgccactgtggaagatgccctccagagcttcctaaaggctgaagaactacagccaggattttccaaagcaggaagggtatatatttccaagtgctacagagaactagggaaaaactctgaagctagatggtggatgaagttggccctggagctgccagatgtcacgaaggaggatttggctatccagaaggacctggaagaactggaagtcattttacgagactaaccacgtttcactggccttcatgacttgatgccactatttaaggtgggggggcggggaggcttttttccttagaccttgctgagatcaggaaaccacacaaatctgtctcctgggtctgactgctacccactaccactccccattagttaatttattctaacctctaacctaatctagaattggggcagtactcatggcttccgtttctgttgttctctcccttgagtaatctcttaaaaaaatcaagattcacacctgccccaggattacacatgggtagagcctgcaagacctgagaccttccaattgctggtgaggtggatgaacttcaaagctataggaacaaagcacataacttgtcactttaatctttttcactgactaataggactcagtacatatagtcttaagatcataccttacctaccaaggtaaaaagagggatcagagtggcccacagacattgctttcttatcacctatcatgtgaattctacctgtattcctgggctggaccacttgataacttccagtgtcctggcagcttttggaatgacagcagtggtatggggtttatgatgctataaaacaatgtctgaaaagttgcctagaatatattttgttacaaacttgaaataaaccaaatttgatgttaaaaaaaa

SEQ ID NO: 403 - DNA, 4569 bp, Homo sapiens
  misc_feature: Incyte ID No: 235482.2
  unsure 3426, 3429, 3673: a, t, c, g, or other
gcgatggtgcatccgggacgagcctccagagaccaagcgggataggtaaacccgccgcgcagctggcgggacgctgggccaacgaggtctggggtcttggcgcggagttcatgggccgccggccaggcttgtgccagtggctttggatccctggcctgcttcccccaacccagcctccagaccagcgctggcctgctccacacactccgcagcaccgtcccgggaaccgagcgtcggcggggaggccgcctctccgcaataccccatgtttccccatcactcgaggagtctgggcagagactggactacaccgtgggagaatctgcaaaggtgttgctggaacagacatatttctagttgtatgaggtggcctggacattactctcgagctccttacccatacttcagtagtaggcatttttcactaaattggagaccaccctgtttgtttgagtctagaactcagttccagtactgtaactggagacctgacaacctgagccagacatctttgattcatctctctagttacgtcatgaacgctgagggagatgagccttcatcaaaacgaagaaaacaccaaggtgtgataaagcggaattgggaatatatatgtagccatgataaagaaaaaacgaagatcctaggagacaaaaatgttgatcccaaatgtgaagacagtgagaacaagtttgacttttcagtgatgtcctataatatactttcacaagatttactggaagataactctcacctttatagacattgccggcggccagtattacactggagttttaggtttcccaatattctgaaagaaattaaacattttgatgcagacgtactttgtttgcaagaagttcaagaagatcattatggagcagagatcaggccaagtttggaatcactgggttatcactgtgaatataagatgcggacaggaaggaaacctgatggctgtgctatttgcttcaaacattccaaattttcactcttgtcagtgaacccagtggaattcttccgccctgatatttctctgttggacagagacaatgttggattagttttactcttacagcccaaaattccatatgctgcctgccctgcaatctgcgtagcaaatacgcatctgttgtataatccaaggcgaggtgatattaagctgacgcaattggcaatgctactggcagagatttccagtgttgcccaccagaaagatggcagcttctgccctattgttatgtgtggtgactttaattctgttcctggttctccactatatagtttcataaaggaaggaaaattgaattatgaaggacttcccataggaaagacagtgatctgacacaaacacagctgaagcaaacagaggtcctagtgacagctgaaaaattgtcttcaaatttacagcaccatttcagtttgtcatctgtttattcacattactttcctgacactggaattccagaagtgaccacctgtcattcccgaagtgccataactgtggattatattttctactctgcagaaaaggaagatgttgctgggcacccaggagctgaagttgctttggttggtggcttgaaacttctagctagactgtcacttcttacagaacaagacttatggactgttaatggacttccaaacgaaaataactcttcagatcatctgcctttattggcaaagttcagacttgagctctgactctctttgatcacatactaattttctttccaatttgtattgtttttcaaagaatgtaaagttcttaagtgtatgcatgttgtttatttttgcactgtggagattctgaagcggttatgttagatgctttgaaactccatatcagaagaaataactttataacaattttttttaataatgaaaaatattttcgtgacaagtgagctctaaattctctttattgtaaaagagatgtaaaggttttatattctaaatcctagtaaaattgacagtgatttttaaatataatgcatcttcctttgtctgcttagtaaaaaatttcatttcataattttggcaagctctgtagtggatccaaagtatctttgagttcttgcaaactacaagttgtttcctttccagaaggcttgatttcattaggagacccctctattgagttctaaatagtttatcttagaaagccttgggtcattcacaggtatccaaccagccattgtttagtttgtttttgaaggggtttgataatgctttttaagttgtacagaatgcttaatccatcttattactgtcctgagccatgtaatatgcctgcatcgtgttggggaaatgtttgggaaatataagccagcataacgtgtaaagctcactctttcaccctggaacagacaagaggtgggcttaatagaggcagagactggggatatacctttgtttccctagcatttttatttatttatttttattttattttattttttgagatggagtttcactcttgttgcccaggctgggggtgcaatggcgcaatctttgctcactgcaacccctgcctcccgggctcaagcgattctcctgcctcagcctctcgagtagctgggattacaggcatgcgtcaccactcccagctaattttgtattttcagtagagacagggtttccccatgttggttaggctggtctcgaactcccaacctcaggtgatccgcccacctcagctctcaaagtgctgggattacaggcgggagccactgcacatggcagcatttttttaaaaattcagttttaagatctctggtttaggggagagattttattttactgaaccagttctatagaaatttattttattaggaaatttgtctttggaacaaagtggcagctataaaattatttttgttaagcctcagaaatatgaggaagcctgtaaaactctagtggggagatattaacttggagacctaatgctctgtaaatagtcatttaaactgttggttttagtggttttgtttctaaaatgttttcttttaccgtgatgcaccagtatgagatggtgctgacactttctatgaagtggttatgagcaggtttaataaatcctctatacaagtgtttgaatcaattttaaaacataaaaagtggaaatttccttttttgtagacagtaggaacaaggaattatatgcatttttactaagtagtaattttacactgaattgtaaatgtttttacagtgagttttattaatagaatgcttcaccttaaattggaaaacaataatagtcttggactaagtctttgtactaaagcatttgctataattatttttaaaaaaacaaacagatgaaaacctcagagaaggcatgtggattataagatttgtctagtaaaaattgtaattgaatatgtttaaatatttaatttctcatttgggggggttttnatntttttattttttagatggtgtctcacgtatcgcccaggctggagtgcagtggcgcgaactcggctcactgcaacctccgcctcctgggttcaagcaattctccttcctcagcctcccaagtagctgggattacaggcatgcaccaccatgcccagctaatttttgtatttttagtagagatggaattttgccatgttggccaggctggtcttgaactcctgacctcaggggtgatccacccgcntcgggctcccaaagtgctgtgattacaggcatgagccaccatgcctggcctttggggggattttaattacagtattaattatagttctaggatttcccacattttatagtagtagtttgcaggatattatgtgccctaattagcagatatagacattatcaaattataatgatagtataattatccctttttaatattggggaaagaaaaatgaaaattcattagttaattactgctttgtgttgtgtgaatttattaacaaataacattattacatataggtcattgttaacaaacaaacatccctgaaaacctctgtgaaaatttaattttttatatcctgattaatatattgtgactttaggcccatttttcatgtgcttcactttgatagagttaatccataaaattgctctttactttagcttatcaaatgaagtattattttgtggactggaggccaaaaagtcaatgtgagcttctcacaggtttttaaagctccactaaaaataattatccacttgtctttacttttgttgaccagaatagttggtaactctgccagagcctgtacttacctgccaaaaacaattaaatctggttaatgcctgaaaccaaatctctcagtctcaagtgttatactatccaagttttaaatggaaaggtaaactgtggagtaatgaaattttggttttactgtaccttttgctatcaagataatattcatgtttgaaatcttgtctttatttggaatttagttactgtctgcttttaacctttgctttcctaaagaaagtttgagatccagagagttcaagggattggggaaagagaggcgtcaagtcatttgcactttgtacctgtaagttaggtaataaactattatactcgtaaaa

SEQ ID NO: 404 - DNA, 2040 bp, Homo sapiens
  misc_feature: Incyte ID No: 1383691.1
tcctggagaagccagaacaatatacaaacaagtatgtggaggcagatttgctttattccaagaggctgtttgagtgtgtgtctgcctaagcctccttatagcctatttttctacttgctgagagagtaatattaaaggaacagtgagggagtggaaggagagccttagttagagcgttcccatttctggcctttgggggtttgcactgtgcgggagatgctctctcatcactctgaaggcccatcctgtgcagaagtgggactctgtggctgttcactgagcaccagggcagactgtagctgagcagacttgggttatggatgggatatggggcccagggaccctcaggacacagggaccggctcaaggtaccactcagcctggccaggacccccagctttgcttttgttcttgatctctttgtgatagagaagcttagaacattgaatttggaaccccaaaatgtgtgagtctttggaaaacccattccagcctttcttcaaatgctcttattttcagtatatgaagtgtgtatttgaaatattcatatttctgttatttcttgttttcaagctctgaattattgcagttttctgtcctgcatgctttcaacagtgtgcttttacagtggcagtttagcacagcgaatgtccctgccccacactccatatggtcctgttttcctgaaaatacactccaggtagcacagacttgttattttgcctggctggttacacacatgctgtcttgctttgctgctcagccacctccctctgaggccaacttaggccaacctacataggactccatctttagcgagacaccagagacacctagtgatgaccacgggtctgcttttctctctgatcctaggggacttgttgacatgggagtgtctgtttccacatggaaggatgtctgtttatctctcatctctgaatagatgtatgacaactctagtgtccatggtttaaaatgttgctttgaggattttccatcctgtataagaagaatggctttcttcagattataatcgttattaaagctgtatgtacactttacttaaaaactattaacagtttttcatgttgcactggtggtaattttgaacttggaattactgggtgggaattccaggaaccacagagtattgatttttgctgccaaaatgctcttgaagcagatgtccctgtgctcccctggctgcttctggctgaaggggggaggtgtagactgaagcttgggcactcatgtgtgtcccctccccagtccccatcctagtggggccagtctcattaggcagccatagataagcctggaacttggctgtcattagtgacttgatcctggtatgaaatgcatactgggtataaggttgctcaggtattttatttccttggccacaactcccatagatgccaatgttttgatagcctcagtttctcaacgatgtcttttgtttacagtgctacacttagtgtgagtcaagaagtgcttgagttacaagaaacttcttattcaggtttgagtaagcattttacttccatgtgtacttttaaataatccataccttgaagaagttggccaatgatattatatacatgctgatctgattgttcttttcattccttgagtcaacttcagggtcttggatactaaagagaaggagaactgtggttaatgttttggatcatcatttgtgaacaaggccagactttgcccattttaggctatccaggacttaaggtagccatctggatcataagaaggtcctgcagttgagacaaaatgacccaagtgtattttccacaagttttgatcctgtgtaatatttctttttccttccctagtgtatgtagatacaaggcatggaatgcagttccactttctccccagagttgatctttttgtgattgctttcccgtctctagtagtattctgttgtgtctagagaactgattttttcctacatacgcaaattgtacatttgtaagtgaaaatgtcaatacattaaagcattaaccttaaaaaaaaaaaaaa

SEQ ID NO: 405 - DNA, 173 bp, Homo sapiens
  misc_feature: Incyte ID No: 474606.1
gctagaactaaaatgtttatgttggtacaaagttatattgatggattcatgttaaaaagtttaaatgcatgtgtgatacaattccctgtaacaataccccagcacagaataatctgtgaaaggcactattctaagcacttttaacatatattatttcatttcaaattcacaaa

SEQ ID NO: 406 - DNA, 627 bp, Homo sapiens
  misc_feature: Incyte ID No: 034306.1
aaactttctcatatcatttccctcttttcaattatcactgcctacacttattaactgagtaatcatagcaatttcctaattggtccttctgtctatgttctgaagcatcaatctttctaaactgcagctaataaaaaacaaaacttctctgctgctgttttttgttgtttttcatagaacacctcagcctggcattcaaggctcttcgaagccttactttccactttattcctacacatacccaaatagaactattcattgttctctaggcaagtttggtcccttttctcccatgtcttttcattcccagttactacagtgtctggcacataacggctcaataaatgtttgttgaatgccttcttgttgaaatccttctcacactaaaacagttcaccttaaacactactttcttcatgaaaatcttaacggccctcatccacaggtctttctccttccttttctagtccttatggcacttaaacctttcactgctgtgtatcatggccatgcgtaagtgtctcattcttctgtaagcctgtaagctggcagaaatgtttctttctttgcttttgtgtctgttgcagtatttcatacaatctcccctccccacttcctacatcagtt

SEQ ID NO: 407 - DNA, 383 bp, Homo sapiens
  misc_feature: Incyte ID No: 981727.4
  unsure 267, 322: a, t, c, g, or other
ataaatagtcctattgtgtaacctctattagtagcacatgcgcaaattagtgaagcaaaaaaagttgttgtgacagctttagttgaaagattgcatcgggctctgacctccttccttgcacatgtttacaagcatttgataaaatgattaaaccctaaggtggaattactactttctgctacagtacaatttgtgtgttaatggatattagtgttattgtaatgtggattaaaataacactaatatccattcacttttgtataatanaatgatgggcatgtccaaatttgggtatctgcctttctcgtggttaggctgtttncatttcttcacatgtaccttgaaaggcttaaatcatagacgttacctgggcccttgattat

SEQ ID NO: 408 - DNA, 551 bp, Homo sapiens
  misc_feature: Incyte ID No: 983416.1
  unsure 29, 46, 132: a, t, c, g, or other
attggaaaactttgcatccccaaaatcantgttataagactatagnacttacatctcttcaggagttctaaaaattaagctgaatttcccataagattctcttattaatcacccacaaaagagaaagacagnaaaacccactaaaaatgatgtgcatttgatcccagtaaaatgttttaaaaaccataatacagaccacccttgttaatacattttgccccattcctcagttgaactcaggggaaagttcaagatttttaggtcctacctgtaaaaataaaaaatttttctaattaccaaatataaatttcactgtaggatatataggaaaacagaaagcaccctaaaaaaaggaaaattaaagcaaccagtaatcccagcactcagatgaccacttttaatatatcagcattcttcattcttgatctatcctgagatgtgcctcttttacacaaatgatatgttttgtaatgtgctttttttaaattaaaaaatacattctgaacattttttcatgctattaaatatacttttccacaacaaatattctc

SEQ ID NO: 409 - DNA, 300 bp, Homo sapiens
  misc_feature: Incyte ID No: 983416.2
atttctcaagaacataatttacaaagtctgctaacaaaacctatattgacaattaaactttgcctctctcctcttcaactttccaagcaattgtctacgtagtttacattctttttctctctgtaccacctttagtggctattccactttagacaaattctgccaggtacggttggtggcaggggtgcctgatccctctgaagttgaaagcagatcagcagcagcctggctattggtggagctgccagtgaaaagcacccagacgacctacctgatggacccatcatcaggctcaaacag

SEQ ID NO: 410 - DNA, 296 bp, Homo sapiens
  misc_feature: Incyte ID No: 399998.1
  unsure 104, 114, 133: a, t, c, g, or other
gttttgaaactgaaagtattccttctttcccttttttcctgtggtggtacccttattttgaggagtatgaacatagaattcatccattcatttgacaaatattnattgagtacntcctttgtactagactttntttaaggctctggagatacagcggtgactaaaacagataaggcccctgtctgaaggagctcatatttgttctaaaatggcaactcctaaagtggcaggtccctgaaaaaaagaaaaataaccaaaatgaagggccaactaggacagttgttatcaggacagat

SEQ ID NO: 411 - DNA, 695 bp, Homo sapiens
  misc_feature: Incyte ID No: 984000.1
aaaagatgtttaaatcaactaggaaatttttcattaggaaaagctgttgaacattgctgtgtgattaatatgcaagaaagcagagaggcctcagtaacactgcatgttgatcaaggatgctgttacccagaaatcagagcccctggatctccagaaggataattatcttaaaagcaagacaagctcaaactataccagctgtcagattttttttacaatgagtgtatgtatatttaaatcgtagctattcattgcaggatttgtgatcccaaatcagaaggacagcatgaacagagcccaaaccaagtaacaacaaatggaatggaaaatgacaggcattttcatagctccatagttcagtggtctgataacatagattttctgaaatgcaaagagtaggtcagcagagaacttttcaaacttgccacaaacattttacttccaaccaccacgaggctaagcaaaaatctcccatgcaaactccaacatgcagtcagccatgctttaagaaatcccctaggcagccattggactgcactgtgaaaaatgtgccaggaagcgcacaaacagccgcaggacgttagtcacatggcattgctgagattcaaggggatactgatatttcccttacaggttaatcttcgatggaattatgagtagggaaagaaaatccatcattctattaaaatgctctt

SEQ ID NO: 412 - DNA, 300 bp, Homo sapiens
  misc_feature: Incyte ID No: 984000.2
atatccaggcccagtcagtgcctgacctaggtacaatcctcaatttgccacatcctatatattttttctagattccccaaccagaaaaagctgagatttaaattctataggttatggagaactaagtgtgacccaaatgagaaaagaaagctggctaaacaaaacacaattatgcgcataaaatgtctccaattttcctattcagcaaaagtcttgtaaagtaaaatggcatattacaacaatattagctcttggatgtaaggagcagaatgcactttagcatgggaaagataagagtct

SEQ ID NO: 413 - DNA, 1189 bp, Homo sapiens
  misc_feature: Incyte ID No: 403464.1
accacatacaggttctcgtgcactgtgctttacacgattacccagtccagaggatccctgagatgcagacctatttcatcagcctatccgagcgctcgaattaagaggtgtcagccaccacacctgggcctacagcagatttatttcagtagctgaaatagttaaaacataatgattcccaaaaggctgagaagcatgcagaaaaaattgaatctttattgctgatgggaatataaaactgtataccacattggaaaataatttggcaatttcttttaaagctaaacacacacatacagttagttagggcttaggcaattgctgtcatggccctatttcataggaaatgaaaatttatgtgtaggacccaaacctggcacttgactgttcacagaaattatttgtaatagtcagaacctggaaacaactcacatgttattcaccaggtaaacagttaaataagtctgttatttccgtattgtgtaatacaactcaaaaattaaaaggaataaactactactatacaaataagccttagatgattctcaattctgaaggaaaaacccatttcaagttgtaacataatgcttatttttatgtatcttaatgtgatgaagttaaatagttttagagaacattgttcgtattcatctgttagggatggtagaagttagggttgtatgtgattataagactagtggaagggatacgtttttaatgatggatgagttctgcattctgattcatgcagtggttacaaaaatgtatacatgtgataaaatgtcatgtaaatgtgcacatttcaccaatgacaatgtgctggttgtgatattgtacaatgttaatggaaaatatcaccactggggaaaattgagtggtatgtgtaaacggtactatatttgcagcattttgtgagtctttattttaacataatatgtaaatatgtaaagcaactagaagaatggttttaataacaggagagtaacagcttataagcaagagaaagaaaaatgataaataatgtgaacacttaccaaaggaagggtggaacagagaaataaaggacagggaaaattatctgtatagctccatccaaatattgtaatttaggaatcatcccagataattcctaaattccaatatttggatggaactatacagaattttaatatatctggaaaataaactg

SEQ ID NO: 414 - DNA, 510 bp, Homo sapiens
  misc_feature: Incyte ID No: 981730.1
gttgcctgccaccacgcccagccttattctctttttctaatagttgcactttatcatattttacaaatgtgtgagtctgctatggattagaaattaataagagattttgccacagatagtttgagaagcccagcactgccactcaacaaatgctggtgcattcagatggtgaaatattctgcagctattaaaggagttaaaactgcctccacttacctggaggcccatctgtgacacctttttaggttaaaaggaaaagaaaaacttgcttaggactgaatatgagcggttgcaatttgtaacaatgatgtatatatacatatacattttcatgtatttgtatgaacataaaagtattgaaggatattcatcaaactgctaaaagggttgcttcagagtaacggactcggagaaggcagattaattttctcttaatggaactctgtattgtatcacttgtaaaaataagcatgtgttatctttatgataaaaaagtaaaaacctaaaaaa

SEQ ID NO: 415 - DNA, 657 bp, Homo sapiens
  misc_feature: Incyte ID No: 981730.2
catccctccatctgctcaacaaacgttagagaatcaatccttgtgtcagatactggggctgccctcaaggagcttttatagagttcagggtacagccaggtgggggagacagatcactataaaaacctaccactataatccaaaggacaagagcaaaaatagtaaagaggagagaagacccaaatttgcctggtgggtcagagagggctttctagaagaggtaaaaaatcttcggggctatcacttcaccttgcctggtggataaagggaggactttccagatacagtggacagaatgtgcagaggcaggagccatgagtggcagaggcaggggagggactgcagagacaggttggagccaaagcacgtggcactggagccatagccaaaggaacaaactgtgagacctgggacttgaatttggaggtggtgaaaagtgacaaggtcttcacagaagagtgattttttcaacttagggaaggctgaccccagaccaatgctgccaaagtgtggtctgtgggctgttagcagttcgtgacgatgtaagtacaggaattgagattaagcatttagaacacctacagcactttgatagtcattttactttttaaattttgagctggcattttatatgcctgtttttttttggttttggtt

SEQ ID NO: 416 - DNA, 2329 bp, Homo sapiens
  misc_feature: Incyte ID No: 2398075CB1
cggaaataactgttcatttttcacttctccctcctaggtcacacttttcagaaaaagaatctgcatcctggaaaccagaagaaaaatatgagacggggaatcatcgtgtgatgtgtgtgctgcctttggctgagtgtgtggagtcctgctcaggtgttaggtacagtgtgtttgatcgtggtggcttgaggggaacccgctgttcagagctgtgactgcggctgcactcagagaagctgcccttggctgctcgtagcgccgggccttctctcctcgtcatcatccagagcagccagtgtccgggaggcagaagatgccccactccagcctgcatccatccatcccgtgtcccaggggtcacggggcccagaaggcagccttggttctgctgagtgcctgcctggtgaccctttgggggctaggagagccaccagagcacactctccggtacctggtcctccacctagcctccctgcagctgggactgctgttaaacggggtctgcagcctggctgaggagctgcgccacatccactccaggtgactcactgcagtacccagggacggggtatccaacgtgtgtcactcccttgatgcctagccctgcccctccttgaacctctctggctgagctgggctgggggctggggtctggggtctggctgtcactcacaggtaccggggcagctactggaggactgtgcgggcctgcctgggctgccccctccgccgtggggccctgttgctgctgtccatctatttctactactccctcccaaatgcggtcggcccgcccttcacttggatgcttgccctcctgggcctctcgcaggcactgaacatcctcctgggcctcaagggcctggccccagctgagatctctgcagtgtgtgaaaaagggaatttcaacgtggcccatgggctggcatggtcatattacatcggatatctgcggctgatcctgccagagctccaggcccggattcgaacttacaatcagcattacaacaacctgctacggggtgcagtgagccagcggctgtatattctcctcccattggactgtggggtgcctgataacctgagtatggctgaccccaacattcgcttcctggataaactgccccagcagaccggtgaccgtgctggcatcaaggatcgggtttacagcaacagcatctatgagcttctggagaacgggcagcgggcgggcacctgtgtcctggagtacgccacccccttgcagactttgtttgccatgtcacaatacagtcaagctggctttagccgggaggataggcttgagcaggccaaactcttctgccggacacttgaggacatcctggcagatgcccctgagtctcagaacaactgccgcctcattgcctaccaggaacctgcagatgacagcagcttctcgctgtcccaggaggttctccggcacctgcggcaggaggaaaaggaagaggttactgtgggcagcttgaagacctcagcggtgcccagtacctccacgatgtcccaagagcctgagctcctcatcagtggaatggaaaagcccctccctctccgcacggatttctcttgagacccagggtcaccaggccagagcctccagtggtctccaagcctctggactgggggctctcttcagtggctgaatgtccagcagagctatttccttccacagggggccttgcagggaagggtccaggacttgacatcttaagatgcgtcttgtccccttgggccagtcatttcccctctctgagcctcggtgtcttcaacctgtgaaatgggatcataatcactgccttacctccctcacggttgttgtgaggactgagtgtgtggaagtttttcataaactttggatgctagtgtacttagggggtgtgccaggtgtctttcatggggccttccagacccactccccacccttctccccttcctttgcccggggacgccgaactctctcaatggtatcaacaggctccttcgccctctggctcctggtcatgttccattattggggagccccagcagaagaatggagaggaggaggaggctgagtttggggtattgaatcccccggctcccaccctgcagcatcaaggttgctatggactctcctgccgggcaactcttgcgtaatcatgactatctctaggattctggcaccacttccttccctggccccttaagcctagctgtgtatcggcacccccaccccactagagtactccctctcacttgcggtttccttatactccacccctttctcaacggtccttttttaaagcacatctcagattaaaaaaaaaaaaaa

SEQ ID NO: 417 - DNA, 109 bp, Homo sapiens
  misc_feature: Incyte ID No: 031914.1
gaactggatccatgaggatgggtgagacagggctgtgaaattagggaaagcttccggggcaggtggaacagcatgaggcttccaacctgcatcagtagaaaatgacact

SEQ ID NO: 418 - DNA, 507 bp, Homo sapiens
  misc_feature: Incyte ID No: 009859.1
ccgggacgctagagcaggcggttcctgggctgctccggtaggtttggcgtgcgcgggtttctgcagatctagggcgagcttgcacgttacatcaccgatgcatctcttcttgcttgcttaatttgccaccacttaggcctttcttgcagaattcgccatatactccttaagggccgcggaatcggagcgaccttggtgactggcaaactctcggcagatgtgcgtgcactggtttgatgcagacgtggttgtaggcgatttaatttttcccagctttgcagcgactgttggcttcccagaacggatctccccagcctcgactggaagctgagggacaaaaattcataaaagcaattactctttcccggcgaggcttctagaagagcaagaagagcgatatgattacacctgcagccctataaagattgatctgtccgtctttcccttacagtcgtggcctgttaaacgttcctgtgttgttcagtgccagaatgagtgaccgctatt

SEQ ID NO: 419 - DNA, 664 bp, Homo sapiens
  misc_feature: Incyte ID No: 228505.1
cttgacacatgtatacactgtgaaaccatcatcacaatcaacagtgaagatgttcctcccgtctctctgtaaccctttcctctctccctccttccctcctccccctcccacccatctgctttttgtcactatagtttgaatttcctggagtttttaaatatctttttatacagagtgagactgtctcaaaaaagctttatatatatttttatatatatgagtattttatatatacactatattacatatatttatgtataaagctatgtatatttgcatatatatagctgatttatacatataaatagcttttagtggtacacttgagattataacatgcgttcttgacttatcaatgtctaatgtaaattagtattttttcctcttcccagacaatgctaaaacagtttattggatattttagttatttctgtatttaaaacttcacaagacacagtactgttgatgttcattttgatggcccacatatatgccactatcattgtgttttatccttctgtgactttctagggtcatttcccttccacctgaagtacccctactattatttcctttagaggaggtctgctgatcatctcagttgtgtttgtctgaaaatatttgtatttaatttttattcttaaaaaatattttttctgagtat

SEQ ID NO: 420 - DNA, 359 bp, Homo sapiens
  misc_feature: Incyte ID No: 982055.1
aatatatttaaagctagaaggccagttacttgcattttagggtagtaaagaaattgaccaagtttatcaaaacaccattggctatccatcttgaaaacacaaagagtattacaaaagtgcataaaactgacaaagagcccaaggcggatcaatacttttagaaaatggagaattatgctttagaaaccacagacctgaagttttgctactcttctttcaaaaactgttttccagaaatcagtcttaaaacactaagaacaaaatgaaatcaagcaaggcagaaccagccccaattaaaaatttgactttcagaagagtaaaaattttgtttcacctaactttatttttttgaaacggag

SEQ ID NO: 421 - DNA, 150 bp, Homo sapiens
  misc_feature: Incyte ID No: 982055.2
  unsure 8, 15, 32, 57, 97-98, 100, 103, 133-134: a, t, c, g, or other
tattttgnctgaacnagactttttgaagcccnttctgtgcaaaatattaattaaaantggaacagtatgttctccatccctgtttttcaaactgttnntngcngcgtgattagggagtcatatacagactttnntggatttcatgttaaa

SEQ ID NO: 422 - DNA, 509 bp, Homo sapiens
  misc_feature: Incyte ID No: 238434.7
ttgctgctttcttaaccaccatgagtaggtaaagcaaataataactcacagagtgtggatttttgagaatctgaatgttttctcattcacaaaagtatcccttctacccctatctggcgcagggctgaaatgtcatcattagaggttctgtcttctggggcttacaagttctatgtttcttaaaattcgctgattaaaaattttaaaaagataggatcacacctgaaagcagtggtcccagctctgtgctgtgggacatcacaggtcctaaacagtgatagagaaagggctggggagtggcagctggaatctctgcttccgtctgaacatctggacacacatgtcagagaatctttgcattaaatggactgcccaatctatttggtgattaaatggctgtgcggtgaggggagaaccctgggcagtctggagactgaggtgccattctcggctagagacaccacccaaagaagagatgggctggctactaaagacaagtgtcagttgaa

SEQ ID NO: 423 - DNA, 441 bp, Homo sapiens
  misc_feature: Incyte ID No: 038699.1
  unsure 42, 83, 94, 101, 119, 142, 148, 166, 170, 173, 182: a, t, c, g, or other
gctgtcattgtttgcagaagtctatgtagaaaactcaagagnatgtacagaaaatcttttagaattaatagagttcaccaggntataaaattancatacangtgcagcatcaaagaggnatgtaatgttaaaaaagataccnttgatnatagaaaccaaaatgtcnggtnctncggaatcantattacggaatatgcatgtaactttagagaaaaataactgatattttagcagacctcaataaagatgtatttatatataggaagattcaagcttctgaagttgtcaattctccctttaataatctataaattcagtataattctaataaaacttccaacaggaatttatttgccctttgtaagtggatgctgctgtggccacatttgaagagaggcttggcctgaggatttgctctaccagataggaagttatcttatt

SEQ ID NO: 424 - DNA, 176 bp, Homo sapiens
  misc_feature: Incyte ID No: 038699.2
tgaatttgatgttaagaaagcctattattgtgaccttacctgtgtaatgcctcatctcccatagagggagaaaaggcatttgataaaattcattgcctttttttaattaagtaaacaccctgtatttatggggtatatgtgatatttggtacgtgcattaaagttcattgcttttt

SEQ ID NO: 425 - DNA, 416 bp, Homo sapiens
  misc_feature: Incyte ID No: 173222.1
  unsure 19: a, t, c, g, or other
cccaggtgcccaccaaggncgcccagcaggcaggctttctaggacagcagccctctcagctgtgccacataagctgtgggcaccacacgcttccttatcgtgcaggcagcaataagtaaataagatgaaccccactccccacagtcccgctgtcgctacaaattaaatgtttctttctttttggcatctaattctgttcatatttaaacacagtgagtagggttgaaatcagtattatatagacagttttggattcttttaaaaaatacgtattatttaaaataataaaccccattatatgctgatacattgcatatttatgaaaagtaacttttctaaagccaaataaatagaagagtggcattgacataagagggctggcatctcagccgctcgggccctccgtccattacaac

SEQ ID NO: 426 - DNA, 367 bp, Homo sapiens
  misc_feature: Incyte ID No: 173093.1
  unsure 65, 250: a, t, c, g, or other
gaggctcttctggctttttcggaggtactcagttacatcctgcttccaagcttttcggagaaganacagggtaacagtccttataaccaacttaggttttcttgtaaattcttggagttcttgtgtttctaatgcaggtataactgtacatgacagagctgagaagatagttgaggttactaagcaactctaacaaaagagggtttttgctgagggcattccatttaagtcccaaactttactttcatangtgagaactgggttttgaagtgtcaaagggaagcagttagaagcaaaatgcagcagtcaataagcccctccttacttcacgttagttggggccagcaagatagtagagaggactgat

SEQ ID NO: 427 - DNA, 819 bp, Homo sapiens
  misc_feature: Incyte ID No: 032858.1
  unsure 80, 100, 691: a, t, c, g, or other
aatagtggaattgttgccggacaatatttatttaaaagacattattgtaaagagtaacagtgtaattctggctccttganatttgaggggaatgattttnctggacattcgaccagtgctttctaaatttctccactgaattctatctaatgacagatgagaggacactgaaagtaggagtagccataagtcaccagtgcaaaatgtcttttgaagtttgcatttattgattgctaccatttatgtaaagttttacagttttgacagtcatagggttcaccaatccaccatagaagagaattaagtcatgcggacacagcagggtttagaatggatgagtagaggagtgtgtgcaggctccagtccccaaagtctctaggactgtcctagaacctgcagctcatctgtcaattctgtcaactactcaggatcctctcaagaattatccccccatacccaccttttaaatttcctcaagctagtttcatttgagttttgtcacttgcaactgaatgagccctgctaatgcagatagattcaattgagaaggggaattctaggctaggagtacaaggttacaggcaaggagacaggaacatagcttgggatttcctggggcagtgagaaaactgactttaaaaaaatggaatggtttctaaaatgtttgtacaacttctctgtatggcaatgnggtaggagtataaattctttcagcttcttctgagggcagctgaacaagaagtataaaaattttgaatgctgataacatttgacctagcaattccatctctagaaataaattctacagtagtaatctta

SEQ ID NO: 428 - DNA, 1067 bp, Homo sapiens
  misc_feature: Incyte ID No: 239410.10
  unsure 279, 282, 288, 293, 310, 554, 579: a, t, c, g, or other
ggaaagcacatgtatgcttttatatacacagaaaaattctagaatggcaaacaagatatctttgcaatagtttttttctgggaggggactcatttaaaaaaattctcccatattgcttgttttgttttgttaaagacatccatgtattcctacttgggttaagccatgataactaaatatgattaaagttcagaacaataaaaaccttagagatgtatacataaatatcacttgcttaggaatttctaggtaggtactattttaagccctctacatatnttntttcantcaanccttggagcaactctangagggaggtgttatcctctaattgcagatgaggttgatgaagcttaaagagtaatgatgccttgagtccatcctctggctccaaagcccttgtatttaactgttctcccttttgcatccctgtgctaaagtgactttgctataatatccacaaggaagaatttctgtgtaaaaattagacttccttgcaggcagtctatcagtgatatccaataaagactcaataatggctaacaatacaaacnacacacacaagataaacttctcctnttgtgccaggtacttagattaggtgtagtggttttcttaaactgattatcaaggtaaacaccacctcatacatttcagcagagagcagtggtttctctctccagcagtgggagccattgaatcaggacaatgccacacagttgggctttcatgttagatagatcactcttgtggttttgggggatggcattataagagaggagactggagacaggggggctattgtcatgcagatttgttggatgtccacccagcattcactttttccatcttttgccaggggtacactacacaacatcaccagtcatttcatagaatggcaattagattaggcttaggtctgcactgccttccttcactccgctctgtcacttgccatcattgtaaatgctgacaacttagtgcctttcatgcttcaagtatcaataagataggaatagtaatagtatcacattgaattattgtggagttttgaacagatgatactt

SEQ ID NO: 429 - DNA, 317 bp, Homo sapiens
  misc_feature: Incyte ID No: 033838.1
  unsure 146: a, t, c, g, or other
caatcactatagtatactattactgattcaggtaagaatcagtgaatactaaaacaactatgtgaaagactgtcgggaaaaaggattgtcacagtgtcaaaatatcattccacagattgcttattaattacaaaaagaacaaagtncctttacaactgggaaatctggaagcactgccttaaccaagtgatcaaacttactaccaccaatgataagcacaaattcacaccatgtgccttctaatgcaatatactaatatgcattcgaatgcatattctaatgcaataatccatgtactatgcttgatcaaccccggt

SEQ ID NO: 430 - DNA, 180 bp, Homo sapiens
  misc_feature: Incyte ID No: 002171.1
actgcgcccggccagaccactataaaggataaaattatgagttaatatatgaattaaaaacagaacaagtccacactgatctgaaagtaagtgtggaggcaggaggaagagaaacatcttctttagagaagaaagccaaataataaatacataagggattacagaaatagaaaatcacca

SEQ ID NO: 431 - DNA, 1301 bp, Homo sapiens
  misc_feature: Incyte ID No: 197849.1
  unsure 1253, 1281: a, t, c, g, or other
cttcccaaatgagctgataaaaaactgacgtgaggctgctttgccttcaataatacctagttttcagctgttccaactcgtttccaaatagaaattagctggaacacactacagtaatctcaaggaagggaaaattaggccttaaaagataccaagaagtcagcatggtacccaattgaaaccttttgaccttagtgggaattcattctatttgcactaaaagccttaacttgctgtattcagagtccctcttaactgtgagtttctatagaactttactttttccactagtgcacagagagagaaaggttatcttaatagtcggtttcatggagatgaaggatgggagattaagaggggggaaatgatttttactggcagctatattccctctctgttctatttgctttaacaaagggataaaacctggcaaagtgtacattattggaggactcaaatctgtatgtgacatgtcccaactactgtccgctaactagttatccaaattgtaaagctacagaagcccagttgaggggtaagtgtgcctggctcacacagcctgcaccctgtcacctcggcaatgagccagtgtggggcactggggacttctaacccttggattgctctttttgacctgtgcataccttctaattgtaaaatatatttcagaccgtgagtaccttgagatctgagcaactgtgttaatgaagtaatagcaatggtccacagtgaaagatgtgttggggtttgcaaaacaagcattccgtcacctctttaataatgtcacagactttttaaaagagaggctatcaagttgtaatataatctgtcatgttttatttaggaaggaaggtaaatttgtgcttgcacggggatcattttgtattatttttgctaatacccagttgaagctaaaaagcaactatttgaatcctgtgaattaatttataagaatgttaaacagctttggaaatacatgcatcttatgaatcatagccttatttagcaagatcaatgttaaagtgttgttatatggcaagtatttaacacattcacagtgtttgtttgatttcaactgtgaattgtcttacagttttttcaaacctagttgtttctatggacacctgctctgaattgtacattgacttcattactaaagaacaaaaatgttcatttttgtcccagtaaattgagactgcttgtacactttcagaaaaatatgtgaatttataaagattttgtagatacttganaaaaaccaaggaaagtttctggacccantgataaaaacttccttttag

SEQ ID NO: 432 - DNA, 633 bp, Homo sapiens
  misc_feature: Incyte ID No: 028772.1
aggcgagccatggcgcctggccagtaaaatgttttctatctagaatgaatcaaggtattttccttgctcagtagcttctagaataagaaaaaaatagcagcaagatctgattcagaaatagttgggagcagaaagttaatatgaaggagttgctacttgttaacagcctagagttgagatctagaagaattattacctttttaaatttgtgatgaaagcttaaatccagcatttgggaagttactctattggctgaactattttggagtttgtaagctttgtattagatattcctgatttaactgaaactaatttgccacatagctttaatttcatcccagttttacttgttttactgtcctcaaaaactcaagacatctgaactcaaaggatctaagcagtataaattaaagcacatgttgaatcactgtagctttcgtaggacatctgattataatgcttttctttgtttctttgtccatactgaacttgtctagtttatctttgagaaacatttgctagtatcaaaaatcttctgtaaagatttgaacaatcttgaattctccttgtcactagccatctcttcccctaaagtataataaaactgtcaggtactaaaaaaaaagtcgacgc

SEQ ID NO: 433 - DNA, 1733 bp, Homo sapiens
  misc_feature: Incyte ID No: 199887.1
cattttttaaaaagccaaaatgaaataaaaataaaaaaaaaattgcgtgcaattttgtattttcatagtcgtatctttttaaaggtatcatgatttcagttgtggtcaggaagtatgtgccttaaatcctctactctagacccaaagtttggagagctatattatttaataagttgtttgtgacagccttgttacctttttcatttgatttgagggagaaagactgtgatcctgacagattccttctcataaaatggcctaatgtgtatcagtctaggacttctggggagggaacctctaccatgcattctgtcccaggatgtcaaagtcataagaatcagggtcccctgaaataaaatcactgaaaagatatgttctgttatatattatttaaaaaatttatctggtgccaccaaagaatgacagcagtttctaaccaacttcatatttatagcatcttatgaagatattgtaaggcttagcatattttgccactggttttctttgtaatataggttgaaagtgagacatgtttgaatacttttgtatgtaaatatctcccattctttttctatctcttcttggtctatatttactaagaattgatatttaaaaaacagttcactaatgaactctacatattattgaacactcacagggcaatattgatttgggtgctactagacttttacctaacattagtctttctcaatagttgttgtaaaggatagtattcaatccagtaaatattaaagtgtattagtttaatgaaggttatttatatactgtcataccacaaacctatggtggaaagaacatctgcattcaccagaatgtacttgttcctttggctgtgaataaattggataagacttttttattgtaagttccagctgttggaagatacggggataagattgacattgctgttgcagtattgcaaaaacatgactaaattggttaattatgtctaccgcttatgtttaagagaatcctttcactaacttaaattgttaacattgttgtgatattgagaaagaatattaacctaaacagtcactttacaacaatcatgtaaagacgtgtgcctgcagttgaggttttttgcatttctgagcctgctttgtattcatgagaaacaaaaacataatgggagaaaagttttagataagcagcattgtaagtttttgtaaagtttgggatgtcaaagtattaacgaagggtactgaaaacatacttttacttgggtcaaattactttttatgatctgatttcttaattttctgtatttgaaatcttgcaaattaggaatatctacatctatagataaataagtaaaacttaatggtagaaataagtgtaattcagcaacatgattcaacaatttttatatttaggataagttattgtttattatattaatatcaaatttatatattgccttgtaatgctaaatgctcttaaaagaatatatgggctacttcaattctaccaccttcttccccctcccccaggacgtacaaaagatcttatattaaccaatcctctgtgaattttgccatatcaaacattgtgccttattttaataaaactgttttgttggaatccagttctatattaaagtctctataatgttgatatttgcctgattacttgttacatcattgaatacatacattaaatatgtactaacattgactctgttctagatgcaatggataaaagataaattg

SEQ ID NO: 434 - DNA, 790 bp, Homo sapiens
  misc_feature: Incyte ID No: 245021.1
  unsure 572, 598, 619, 635: a, t, c, g, or other
tctttagaagccacagggctagaagagaagtcaccaaacacctagggacagtcctaggcctagaaagccctttaaagtaatagtgaattgttttaaaattaagttattgagtggcctactgactgccatccaaaaacctttatcaccaaatttgttcagtgtttgctattgggagattgtccatatccctccgtaattaagggccagcaagtaatacgatcttcttacagccaaccttgctcttcccaaagggagaaagtaatacatcattaacctggaatttgtgatataacaggtagccttggttaatgtttaccttttcactatgtaaaaaagaaaaaacacacagcaaatagtgcaaataaaatttggtcttttaaagcattttagcagtagctatgtaaaaaaagttaatggttattattcctaaattttcataagacccttggtagacaaaactatcggttatattatgtatatatgaggttagttaagctgcatttagttaggaacatttaatttttacctaaatgatccttttttcatccagaggtagagattttattggtcantatgaatggttactccccatttagtnccaaatagtgagcctttaagntgtgccaggtacttancaatagtaaaagctattgtatagatttttattcaatgtgacctataatacatttctgattccttctgtattgaatgtcccagtttccatattaagtgctatgccctgtataacattaatgaatttaatagtgtacaattttgggccaggcatggt

SEQ ID NO: 435 - DNA, 1663 bp, Homo sapiens
  misc_feature: Incyte ID No: 167998.1
agtgttgtttgtttcagtggttgtgagggtttcttgtttcctttagatctttaccttaggccaaactcagtttaggaaaaaaaaattgtttgaactattctgtgttgtaatagcacatttctgttgagttaatagtggtcttcccaccaacccctaaaaccaggttgatttgctcaatctcagtttgtataaccccagtaagcgcatggaggtgagtttctacttcgacttgtggcgacacagtgccagtttcctgagctgtgtgtactacttgcaagaggcaagtctgctgaagaaccccttcttttaacagtggaaaatcaagaacagaaaatctgttcacacacctgtgtcttattctttatatatgctacaaggtagagcgagcagcgaccaataaagtatccctcattttaaaccaagttgtcagatttctctgctgatagaacgctgcatagtatcttctagccctaaaaatgaccaggttgggcatgagttaacaggatattgtggcaaaaggaattttctgcttagaaaagtaaatgtagataaacctaaactccaccctgtactgagccttaggctagggactcatgtgtaaagatgacttttctccccagatatcttgtcattgacaggccttcctagtctggtagtccctacatatgggtgttctcctgagagtgagaaaaaacccaaggtcattgacagattcctggcaggtgacagacttcattatgattctgactctagactgaccccatcaagatagtcgtttccgtcagtgaacagatgctgaaggccttgccattacaaaggagactactgagttccctgggtcataaggagtccagaaattagtgtgagaaggtccttctggaagtgaactcaaaattcatgtccagctgtcatcgttaaacccttaggcaggtgagtataacccattctaacctcttggagaagggagtgtgatcaatgtgaatcactatagtattgctcatctgagacattcctcttatatccaagcagctatctcccatgagtgaacatcccagtggtttcagaaaatcagtgtcctgaacagattctagccaagccccatctaccatctctggccaactgcaaccgctgctgctgtagcaggtctggtgtcaatttcctacaggcttgggagcccatctcctcagggaggctttttatctctctgcagcctcatcccctagcatctctcaaggtagactactctctcagcctgaatcatgtatgctaccgtgaacatctgccaacttcattatctagcccagtatctcttccctcacagagaagaagaaatatgaaatacaaagttgatccatttgttggctttctctggccggagaaacctctcgggttgttgctgtgagctttgatgaagttgttaataaccagggccatttgcacataggtttttttaaaaaacatgaaaagttcccttctcctttaattagccagtgtttccggggctgaagacgccctcctccccctctgcgcttacccaggacagttaaattaaattgcactgtcatttaagatattatgttgttaattactcgtttgtgtcttcccacccgtgtcacagcctggagtttttattcaattaaatctctgtctcttgcccaaaaaa

SEQ ID NO: 436 - DNA, 446 bp, Homo sapiens
  misc_feature: Incyte ID No: 194251.1
gagaaataagggtcaggactcaaagcagtggacataatcaggacagaacaggccgaagtgcagacacaaaacagatcaataaaacccaacagctcagcaaaggtgaggcagctgtgtctccctctggctgccttttctcccctcctctctcaccagaagccatacggtacacgctgagtggagaggccgcgaggacaagacagtgggacatgcgtgtgctggggaagtcgagaagcaggacaggaggcaggtctgagagatctggtttgtgtcttgtgccctggttctctctgcattccttctctgtctctttttcccttcctcatgccttttccttagctgatttccctaggacagaattattttctttttcggactgaatggtaaagaagtatttgtttcctaagtcttcatttcaaaagcaacaggatagaactctctaagac

SEQ ID NO: 437 - DNA, 3157 bp, Homo sapiens
  misc_feature: Incyte ID No: 998143.10
attctgtagagttggggaaatctggaagactcttgaggacatagctttgccgaaattgctggttgtcacaagactcttcaaaaactacttttcatcagacatctcccagggctctgaggtgaatattaattcagcagaaagatccttttctgctacataggcaggaggtccagacacaggggagtgggtgcaacccagctggtcccattttctgtaatataattaacaatgaagctcatactttctcaacttctagaagcctggaggatggaagcagcccgagagtagggtgaatgatggcctcagtgggcccttcttaatgtgtctcagtactgaatgtgtggagattgtagaaaaatagaaggcccttggaaaaaacctctgttcgtttctctgttcgtttcgctccctgatctccctgccggattgcttttctttcctttctcttccttggctgtcctttacctcatggtgtggggtgtgcagatagcaggttgtggcttggtgagtgctcttcacttcaggtcaaggtgaggcacagttaacatgctaactactttcctcagttctctctgagttgtgtaaagctcccgatgccagacttcctcttaattttgcacattattaaagtccaaagagttaagatttggtgatgtggggcaaagggccagctgtcacagaaatcaatgaaatgatacacagaaatgggtatcatgaaaaggccactggacttgggaaaactgggtgcctgtccttgccctgccatgtacttacctgtgtgactggaggtgagatgttttacctatgggcctcagtttctcattacaaaatgacagagaagactagatacctaagttcctaagtttgtgacatttgtgaatttttcttggccctctgtgagtagagtgctaaatttagaggcttcctgtggttgaactgatgtccaattctcagggaacccagacttctcagttcagaacccagttccagatttttgtgggaatagggaaaggtattaaataactccattgaattctttcctgcataatgccctgctgtggctgagactcaatgaggtcatcacctccaacacacagaacccctcatcatctccttacagccagactggagcttccaaggacatcaggttggcaaggattgtgagtaccctaaacatctaaagagtccctctaataagggacatatttgttcttcaacagtttcctaacttgagaccacaaatgcgtaatctctctaatatcctaaagcttggacaaactgggcagcccctgagcagaccgcacagagcttaaatgtcagtgctttccttccagaaagaaaaagaatggtcctacacctcccaatccatgggctgatacatatgccaagggagccggatgaagaagtgggtgattttaaatagctaagactgcccatgggcaaacgttctttggcttttctcctctgcaataagtataccttcctctctcctggtccttttctcctttcccaggcccctctatcaataataattctggctctcagatgactacagttgattaggtggaactgataggataaaggtgacacccttcccaaggctatctataatgcaaaaagatatccaagaaaaagagaggtagggaacaccttgggaaaccatttctggaagacagccagtccctgctgtagacaagcctcattttccttcccccaaatgttaaagagtaaattcctcctgtagccttagctctcttttctatctttggcttgctttttatgaactatctttagagtgccaaattagaacagggtaggcagaggcaggaatatgcccaaatttgggaagacctgattgggaatagtcgaaagccttgatatgtgcaaagaaagaaccatttgatcaacccagttcttaatacaggatactaacttaaaatttagactcaagttatacgataattcaaacatttattgtatttatactattctatatgtacttttccaggaaccaggaatacaaaactgacatttctctgtacagaggctcagactagtagagaacagttaggtacgccgttaattataaactaatatgtatcatcaattatgggtttttatgggggtttggcaggtggaagggaccagggagagatgatgagtgatgatggttatgtagtctttaggaggatgcaattataacattgctcttcctttcacgcaccacatgatttagcaagtacttcatattggctccaccattaacatggtcaatggcttctggatactcacagttcaggcacagtttctcctgaagattttttacctctcccatctttaagaaattgtctggatgtccatgaaagatgctgacacttgtattaattcattaaaaaacaccaccccctccctgaaataaactaaaaagtaatgaattcatagaaaaaaatttcaccaagattgaaactagagaatatacctagacttgcactttgagctttgagaaatgtgtacctattcaccattccaacgtgaagaagctctgcagtaggaaaaataattaacacacttatagtctactgcccatgtaaggatcagctccggctaagaggccaaagatgggtgacatcgttatgctctgcctttattttttctttcttacccacttagcttcctaattggaggaaggaggcgtggtaaaggtatatgaagactatggtttaattagaccagaaaacactgtcataatctctggggtcatcagaatgtccagttttgtctttgggccaagataagggcagtgggatttatgatgtgttgtttatagtctgaaactactctggtgatcaccagggtcagtttctttaatgatggtttccaactggcctaatacattaagtaagactggctgataacatgaccagacagacataaagaccctgttgggaatgacattgaactctcaaactcaagatttcttacacaaatctatcagctggagaaaatgaaggcagtgtggtatatgtgtgcaaataaggacattatgaagcttaaatatggaatgtctcttggacccccgatgtcatctgtattctctttttcttcttgtactatatcctttgcctgtaaataaaaggtttatttgattaaaaaaaat

SEQ ID NO: 438 - DNA, 3239 bp, Homo sapiens
  misc_feature: Incyte ID No: 241624.1
aagatggacaccagccctcagcatgaggaaattcagggtcccctaccagatgagagagattgtgtacatgtgtgtgtgagcacatgtgtgcatgtgtgtgcacacgtgtgcatgtgtgtgttttagtgaatctgctctcccagctcacacactcccctgcctcccatggcttacacactaggatccagactccatggtttgacaccagcctgcgtttgcagcttctctgtcacttccatgactctatcctcataccaccactgctgcttcccacccagctgagaatgccccctcctccctgactcctctctgcccatgcaaattagctcacatctttcctcctgctgcaatccatcccttcctcccattggcctctccttgccaaatctaaatactttatatagggatggcagagagttcccatctcatctgtcagccacagtcatttggtactggctacctggagccttatcttctgaagggttttaaagaatggccaattagctgagaagaattatctaatcaattagtgatgtctgccatggatgcagtagaggaaagtggtggtacaagtgccatgattgattagcaatgtctgcactggatacggaaaaaagaaggtgcttgcaggtttacagtgtatatgtgggctattgaagagccctctgagctcggttgctagcaggagagcatgcccatattggcttactttgtctgccacagacacagacagagggagttgggacatgcatgctatggggaccctcttgttggacacctaattggatgcctcttcatgagaggcctccttttcttcaccttttatgctgcactcctcccctagtttacacatcttgatgctgtggctcagtttgccttcctgaatttttattgggtccctgttttctctcctaacatgctgagattctgcatccccacagcctaaactgagccagtggccaaacaaccgtgctcagcctgtttctctctgccctctagagcaaggcccaccaggtccatccaggaggctctcctgacctcaagtccaacaacagtgtccacactagtcaaggttcagcccagaaaacagaaagcactctaggaatcttaggcagaaagggattttatctaaatcactggaaaggctggaggagcagaaggcagaggccaccactggactattggtttcaatattagaccactgtagccgaatcagaggccagagagcagccactgctactgctaatgccaccactacccctgccatcactgccccacatggacaaaactggagtcgagacctaggttagattcctgcaaccacaaacatccatcagggatggccagctgccagagctgcgggaagacggatcccacctccctttcttagcagaatctaaattacagccagacctctggctgcagaggagtctgagacatgtatgattgaatgggtgccaagtgccagggggcggagtccccagcagatgcatcctggccatctgttgcgtggatgagggagtgggtctatctcagaggaaggaacaggaaacaaagaaaggaagccactgaacatcccttctctgctccacaggagtgtcttagacagcctgactctccacaaaccactgttaaaacttacctgctaggaatgctagattgaatgggatgggaagagccttccctcattattgtcattcttggagagaggtgagcaaccaagggaagctcctctgattcacctagaacctgttctctgccgtctttggctcagcctacagagactagagtaggtgaagggacagaggacagggcttctaatacctgtgccatattgacagcctccatccctgtcccccatcttggtgctgaaccaacgctaagggcaccttcttagactcacctcatcgatactgcctggtaatccaaagctagaactctcaggaccccaaactccacctcttggattggccctggctgctgccacacacatatccaagagctcagggccagttctggtgggcagcagagacctgctctgccaagttgtccagcagcagagtggccctggcctgggcatcacaagccagtgatgctcctgggaagaccaggtggcaggtcgcagttgggtaccttccattcccaccacacagactctgggcctccctgcaaaatggctccagaattagagtaattatgagatggtgggaaccagagcaactcaggtgcatgatacaaggagaggttgtcatctgggtagggcagagaggagggcttgctcatctgaacaggggtgtatttcattccaggccctcagtctttggcaatggccaccctggtgttggcatattggccccactgtaacttttgggggcttcccggtctagccacaccctcggatggaaagacttgactgcataaagatgtcagttctccctgagttgattgataggcttaatggtcaccctaaaaacacccacatatgcttttcgatggaaccagataagttgacgctaaagttcttatggaaaaatacacacgcaatagctaggaaaacacagggaaagaagagttctgagcagggcctagtcttagccaatattaaaacatactatgaagcctctgatacttaaacagcatggcgctggtacgtaaatagaccaatgcagttaggtggctctttccaagactctggggaaaaaagtagtaaaaagctaaatgcaatcaatcagcaattgaaagctaagtgagagagccagagggcctccttggtggtaaaagagggttgcatttcttgcagccagaaggcagagaaagtgaagaccaagtccagaactgaatcctaagaaatgcaggactgcaaagaaattggtgtgtgtgtgtgtgagtgagtatgtgtgagtgtgaaatttttaaaaagtttttattgagatacaagtcaataccataaagctctcacccttctaaagtgtacaattcagtggtgtgagtatattcataagatttatacttggtgtctattcataagacttatatccagcatattcataactagagccatatcacagatgcattcatcataataattccagacattttcatcaccctaaaaggaaaccctgaaacccattagcagtcattccccattcctccaacccattctctccctaatccctagaaaccaccaatctgctgtgtatttcatctattgccaacatttcatataaatggcatcatac

SEQ ID NO: 439 - DNA, 4546 bp, Homo sapiens
  misc_feature: Incyte ID No: 346511.8
  unsure 2849-2944: a, t, c, g, or other
cggcagccagctgagagcaatgggaaatggggagtcccagctgtcctcggtgcctgctcagaagctgggttggtttatccaggaatacctgaagccctacgaagaatgtcagacactgatcgacgagatggtgaacaccatctgtgacgtcctgcaggaacccgaacagttccccctggtgcagggagtggccataggtggctcctatggacggaaaacagtcttaagaggcaactccgatggtacccttgtcctcttcttcagtgacttaaaacaattccaggatcagaagagaagccaacgtgacatcctcgataaaactggggataagctgaagttctgtctgttcacgaagtggttgaaaaacaatttcgagatccagaagtcccttgatgggttcaccatccaggtgttcacaaaaaatcagagaatctctttcgaggtgctggccgccttcaacgctctgagcttaaatgataatcccagcccctggatctatcgagagctcaaaagatccttggataagacaaatgccagtcctggtgagtttgcagtctgcttcactgaactccagcagaagttttttgacaaccgtcctggaaaactaaaggatttgatcctcttgataaagcactggcatcaacagtgccagaaaaaaatcaaggatttaccctcgctgtctccgtatgccctggagctgcttacggtgtatgcctgggaacaggggtgcagaaaagacaactttgacattgctgaaggcgtcagaaccgtactggagctgatcaaatgccaggagaagctgtgtatctattggatggtcaactacaactttgaagatgagaccatcaggaacatcctgctgcaccagctccaatcagcgaggccagtaatcttggatccagttgacccaaccaataatgtgagtggagataaaatatgctggcaatggctgaaaaaagaagctcaaacctggttgacttctcccaacctgggataatgagttacctgcaccatcttggaatgttctgcctgcaccactcttcacgaccccaggccaccttctggataagttcatcaaggagtttctccagcccaacaaatgcttcctagagcagattgacagtgctgttaacatcatccgtacattccttaaagaaaactgcttccgacaatcaacagccaagatccagattgtccggggaggatcaaccgccaaaggcacagctctgaagactggctctgatgccgatctcgtcgtgttccataactcacttaaaagctacacctcccaaaaaaacgagcggcacaaaatcgtcaaggaaatccatgaacagctgaaagccttttggagggagaaggaggaggagcttgaagtcagctttgagcctcccaagtggaaggctcccagggtgctgagcttctctctgaaatccaaagtcctcaacgaaagtgtcagctttgatgtgcttcctgcctttaatgcactgggtcagctgagttctggctccacacccagccccgaggtttatgcagggctcattgatctgtataaatcctcggacctcccgggaggagagttttctacctgtttcacagtcctgcagcgaaacttcattcgctcccggcccaccaaactaaaggatttaattcgcctggtgaagcactggtacaaagagtgtgaaaggaaactgaagccaaaggggtctttgcccccaaagtatgccttggagctgctcaccatctatgcctgggagcaggggagtggagtgccggattttgacactgcagaaggtttccggacagtcctggagctggtcacacaatatcagcagctctgcatcttctggaaggtcaattacaactttgaagatgagaccgtgaggaagtttctactgagccagttgcagaaaaccaggcctgtgatcttggacccagccgaacccacaggtgacgtgggtggaggggaccgttggtgttggcatcttctggcaaaagaagcaaaggaatggttatcctctccctgcttcaaggatgggactggaaacccaataccaccttggaaagtgccggtaaaagtcatctaaaggaggcgttgtctggaaatagccctgtaacaggcttgaatcaaagaacttctcctactgtagcaacctgaaattaactcagacacaaataaaggaaacccagctcacaggagcttaaacagctggtcagccccctaagcccccactacaagtgatcctcaggcaggtaaccccagattcatgcactgtagggtgctgcgcagcatccctagtctctacccagtagatgccactagccctcctctcccagtgacaaccaaaagtcttcagacattgtcaaacgttcccctgggttcacagatctttctgcctttggcttttggctccaccctctttagctgttaatttgagtacttatggccctgaaagcggccacggtgcctccagatggcaggtttgcaatccaagcaggaagaaggaaaagatacccaaaggtcaagaacacagtgattttattagaagtttcatccgcaaattttcttccatttcattgctcagaaatgtcatgtggttacctgtaacttgaaggtggctacaaagatgactgtggacgtgggttgcactggccacccaaggatgtctgccacacctctccaaagccctccctacctaccaagatatacctgatatattccaccaggatatcctccctccagatatacttggttctctccaccaggttctttctttaaagcaggattctcaactttgatacttactcacattgggctagacagttctttgtttggaggctctcttgtgcannnnnnnnnnnnnnnnnnnnnnnnnnnnnnnnnnnnnnnnnnnnnnnnnnnnnnnnnnnnnnnnnnnnnnnnnnnnnnnnnnnnnnnnnnnnnnnnccctaggtgagaacccttgcactagaggaaccctacaccccaaccctggggggaatgtagggaagaggtggccaagccaaccgtggggttagctctaattattaagatatgcattataaataaataccaaaaaattgtctctggcaatagttaccttcccagatacaggtccccccttttttcccctaactcttttaagcaatgattgtaactattaggagacattgctctcccacgtatgtttttctttttagacaatgcagacaccaggaagttgtggagctaggatccatcctattgtcaatgagatgttctcatccagaagccatagaatcctgaataataattctaaaagaaacttctggagatcatctggcaatcgcttttaaagactcggctcaccgtgagaaagagtcactcacatccattcttcccttgatggtccctattcctccttcccttgcttcttggacttcttgaaatcaatcaagactgcaaaccctttcataaagtcttgccttgctgaactccctctctgcaggcagcctgcctttaaaaatagttgctgtcatccactttatgtgcatcttatttctgtcaacttgtattttttttcttgtatttttccaattagctcctcctttttccttccagtctaaaaaaggaatcctctgtgtcttcaaagcaaagctctttactttccccttggttctcataactctgtgatattgctctcggtgcttccaactcatccacgtcctgtctgtttcctctgtatacaaaaccctttctgcccctgctgacacagacatcctctatgccagcagccagccaaccctttcattagaacttcaagctctccaaaggctcagattataactgttgtcatatttatatgaggctgttgtcttttccttctgagcctgcctttctccccccacccaggagtatcctcttgccaaatcaaaagactttttccttgggctttagccttaaagatacttgaaggtctaggtgctttaacctcacataccctcacttaaacttttatcactgttgcatataccagttgtgatacaataaagaatgtatctggattttgtgcctagttcctagcacacagcttcaaaaattctagagtttcctgataggagtgtcttttgtattcataacaagcccttttcacccatgcctgggtttatgctaacaaggttacccatggtgggcccttagtttcaaggaaggagttggccaagccagaaagaccaagcatgtggttaaagcattggaattttcagccccatcccacccccaatctccaaggaggtgatggggctggaaattgagttcaattttaacatggccagtgatttaagcaatgctgcctatgtaaagaaaccccaataaaaactctggacagtgaggcttggggagcttcctgattggcagacattccaatgtactaggaaggtagcgcatcttgattccacagggacaaaggctcctgagctctgggcccttccagtgcttgccaccctacatactctttgtctggctcttcatttgtattctttataataaaatggtgattgtaagtagagc

SEQ ID NO: 440 - DNA, 3199 bp, Homo sapiens
  misc_feature: Incyte ID No: 346511.7
gtttcctggctctgggcagcagcaagaattcctctgcctcccatcctaccattcactgtcttgccggcagccagctgagagcaatgggaaatggggagtcccagctgtcctcggtgcctgctcagaagctgggttggtttatccaggaatacctgaagccctacgaagaatgtcagacactgatcgacgagatggtgaacaccatctgtgacgtcctgcaggaacccgaacagttccccctggtgcagggagtggccataggtggctcctatggacggaaaacagtcttaagaggcaactccgatggtacccttgtcctcttcttcagtgacttaaaacaattccaggatcagaagagaagccaacgtgacatcctcgataaaactggggataagctgaagttctgtctgttcacgaagtggttgaaaaacaatttcgagatccagaagtcccttgatgggttcaccatccaggtgttcacaaaaaatcagagaatctctttcgaggtgctggccgccttcaacgctctgagcttaaatgataatcccagcccctggatctatcgagagctcaaaagatccttggataagacaaatgccagtcctggtgagtttgcagtctgcttcactgaactccagcagaagttttttgacaaccgtcctggaaaactaaaggatttgatcctcttgataaagcactggcatcaacagtgccagaaaaaaatcaaggatttaccctcgctgtctccgtatgccctggagctgcttacggtgtatgcctgggaacaggggtgcagaaaagacaactttgacattgctgaaggcgtcagaaccgttctggagctgatcaaatgccaggagaagctgtgtatctattggatggtcaactacaactttgaagatgagaccatcaggaacatcctgctgcaccagctccaatcagcgaggccagtaatcttggatccagttgacccaaccaataatgtgagtggagataaaatatgctggcaatggctgaaaaaagaagctcaaacctggttgacttctcccaacctggataatgagttacctgcaccatcttggaatgttctgcctgcaccactcttcacgaccccaggccaccttctggataagttcatcaaggagtttctccagcccaacaaatgcttcctagagcagattgacagtgctgttaacatcatccgtacattccttaaagaaaactgcttccgacaatcaacagccaagatccagattgtccggggaggatcaaccgccaaaggcacagctctgaagactggctctgatgccgatctcgtcgtgttccataactcacttaaaagctacacctcccaaaaaaacgagcggcacaaaatcgtcaaggaaatccatgaacagctgaaagccttttggagggagaaggaggaggagcttgaagtcagctttgagcctcccaagtggaaggctcccagggtgctgagcttctctctgaaatccaaagtcctcaacgaaagtgtcagctttgatgtgcttcctgcctttaatgcactgggtcagctgagttctggctccacacccagccccgaggtttatgcagggctcattgatctgtataaatcctcggacctcccgggaggagagttttctacctgtttcacagtcctgcagcgaaacttcattcgctcccggcccaccaaactaaaggatttaattcgcctggtgaagcactggtacaaagagtgtgaaaggaaactgaagccaaaggggtctttgcccccaaagtatgccttggagctgctcaccatctatgcctgggagcaggggagtggagtgccggattttgacactgcagaaggtttccggacagtcctggagctggtcacacaatatcagcagctctgcatcttctggaaggtcaattacaactttgaagatgagaccgtgaggaagtttctactgagccagttgcagaaaaccaggcctgtgatcttggacccagccgaacccacaggtgacgtgggtggaggggaccgttggtgttggcatcttctggcaaaagaagcaaaggaatggttatcctctccctgcttcaaggatgggactggaaacccaataccaccttggaaagtgccgacaatgcagacaccaggaagttgtggagctaggatccatcctattgtcaatgagatgttctcatccagaagccatagaatcctgaataataattctaaaagaaacttctggagatcatctggcaatcgcttttaaagactcggctcaccgtgagaaagagtcactcacatccattcttcccttgatggtccctattcctccttcccttgccttcttggacttcttgaaatcaatcaagactgcaaaccctttcataaagctgccttgctgaactcctctctgcaggagccctgcttaaaatagttgatgtcatcactttatgtgcatcttatttctgtcaacttgtattttttttcttgtatttttccaattagctcctcctttttccttccagtctaaaaaaggaatcctctgtgtcttcaaagcaaagctctttactttccccttggttctcataactctgtgatcttgctctcggtgcttccaactcatccacgtcctgtctgtttcctctgtatacaaaaccctttctgcccctgctgacacagacatcctctatgccagcagccagccaaccctttcattagaacttcaagctctccaaaggctcagattataactgttgtcatatttatatgaggctgttgtcttttccttctgagcctgcctttctccccccacccaggagtatcctcttgccaaatcaaaagactttttccttgggctttagccttaaagatacttgaaggtctaggtgctttaacctcacataccctcacttaaacttttatcactgttgcatataccagttgtgatacaataaagaatgtatctggattttgtgcctagttcctagcacacagcttcaaaaattctagagtttcctgataggagtgtcttttgtattcataacaagcccttttcacccatccctgggtttatgctaacaaggttacccatggtgggcccttagtttcaaggaaggagttggccaagccagaaagaccaagcatgtggttaaagcatggaattttcagccccatcccacccccaatctccaaggaggt

SEQ ID NO: 441 - DNA, 1240 bp, Homo sapiens
  misc_feature: Incyte ID No: 234866.20
cttgctcaaggacatcagctaacaagtggtggaaatggaattcaagctcagtggactctaaagccagtgctcatgtcactgtgctaaacagcctgccttgtcacatccccacctctcatctgaccaatgggagactctgagcagctgagtgacttgggttgtcacacagctaaacaggggcaaaggacccagtcttggatctttccacctccaagcaggaatctgtctgattccaggggattgatgatgttgcagatggctaggaagcagactccaggatggaatttagtatgcaggatgttctgggggagagccactggaaccagcactcagggaaaggggggaagaaaggataggaaggaagcatgaaagagaatagggagaagtgaacagggatgcagagcgaatgccagtttcagccaactccaaggacagccctggagctggaatggcctttagagctgccccatggtgacagaggtggccaggcttctatacccctacgtggatcactcactgtgcttgggcaccttgggaaagggcatggctttgagcaaaaggctctctgcagctgaggcaacccctaaaagggctgacggctgaagtctgtctgctgaccactgtcccagcagctggggcttgttagtccttcctcaaagggggatccagatggcatgtcacagtgtctaccgtaaatgctcactgaatccagctgcaatgcaggaagactccctgatgtgatcatgtgtctcaccctttcaagctgaaagcaacagtacagacgatgagaccgacgatcccaggacgtatcagaaatatggttacattggaacacatgagtaccctcatttctctcatagacccagcacactccaggcagcatccaccccacaggcagaagaggactggacctgcaccatcctctgaatgccagtgcatcttgggggaaagggctccagtgttatctggaccagttccttcattttcaggtgggactcttgatccagagaagacaaagctcctcagtgagctggtgtataatccaggacagaacccaggtctcctgactcctggccttctatgccctctatcctatcatagataacattctccacagcctcacttcattccacctattctctgaaaatattccctgagagagaacagagagatttagataagagaatgaaattccagccttgactttcttctgtgcacctgatgggagggtaatgtctaa

SEQ ID NO: 442 - DNA, 7222 bp, Homo sapiens
  misc_feature: Incyte ID No: 232049.2
agagagatcacacccccagccgaccctgccagcgagcgagcccgaccccaggcgtccatggagcgtcgcctccgcccggtccctgccccgacccccgcctgcggcgcgctcctgccttgaccaggacttgggactttgcgaaaggatcgcggggcccggagaggtgttggagagcacaatggctgaacaagtccttcctcaggctttgtatttgagcaatatgcggaaagctgtgaagatacgggagagaactccagaagacatttttaaacctactaatgggatcattcatcattttaaaaccatgcaccgatacacactggaaatgttcagaacttgccagttttgtcctcagtttcgggagatcatccacaaagccctcatcgacagaaacatccaggccaccctggaaagccagaagaaactcaactggtgtcgagaagtccggaagcttgtggcgctgaaaacgaacggtgacggcaattgcctcatgcatgccacttctcagtacatgtggggcgttcaggacacagacttggtactgaggaaggcgctgttcagcacgctcaaggaaacagacacacgcaactttaaattccgctggcaactggagtctctcaaatctcaggaatttgttgaaacggggctttgctatgatactcggaactggaatgatgaatgggagcaatcttatcaaaatggcttccacagacacacccatggcccgaagtggacttcagtacaactcactggaagaaatacacatatttgtcctttgcaacatcctcagaaggccaatcattgtcatttcagacaaaatgctaagaagtttggaatcaggttccaatttcgcccctttgaaagtgggtggaatttacttgcctctccactggcctgcccaggaatgctacagataccccattgttctcggctatgacagccatcattttgtacccttggtgaccctgaaggacagtgggcctgaaatccgagctgttccacttgttaacagagaccggggaagatttgaagacttaaaagttcactttttgacagatcctgaaaatgagatgaaggagaagctcttaaaagagtacttaatggtgatagaaatccccgtccaaggctgggaccatggcacaactcatctcatcaatgccgcaaagttggatgaagctaacttaccaaaagaaatcaatctggtagatgattactttgaacttgttcagcatgagtacaagaaatggcaggaaaacagcgagcaggggaggagagaggggcacgcccagaatcccatggaaccttccgtgccccagctttctctcatggatgtaaaatgtgaaacgcccaactgccccttcttcatgtctgtgaacacccagcctttatgccatgagtgctcagagaggcggcaaaagaatcaaaacaaactcccaaagctgaactccaagccgggccctgaggggctccctggcatggcgctcggggcctctcggggagaagcctatgagcccttggcgtggaaccctgaggagtccactggggggcctcattcggccccaccgacagcacccagcccttttctgttcagtgagaccactgccatgaagtgcaggagccccggctgccccttcacactgaatgtgcagcacaacggattttgtgaacgttgccacaacgcccggcaacttcacgccagccacgccccagaccacacaaggcacttggatcccgggaagtgccaagcctgcctccaggatgttaccaggacatttaatgggatctgcagtacttgcttcaaaaggactacagcagaggcctcctccagcctcagcaccagcctccctccttcctgtcaccagcgttccaagtcagatccctcgcggctcgtccggagcccctccccgcattcttgccacagagctggaaacgacgcccctgctggctgcctgtctcaagctgcacggactcctggggacaggacggggacgagcaagtgcagaaaagccggctgcgtgtattttgggactccagaaaacaagggcttttgcacactgtgtttcatcgagtacagagaaaacaaacattttgctgctgcctcagggaaagtcagtcccacagcgtccaggttccagaacaccattccgtgcctggggagggaatgcggcacccttggaagcaccatgtttgaaggatactgccagaagtgtttcattgaagctcagaatcagagatttcatgaggccaaaaggacagaagagcaactgagatcgagccagcgcagagatgtgcctcgaaccacacaaagcacctcaaggcccaagtgcgcccgggcctcctgcaagaacatcctggcctgccgcagcgaggagctctgcatggagtgtcagcatcccaaccagaggatgggccctggggcccaccggggtgagcctgcccccgaagacccccccaagcagcgttgccgggcccccgcctgtgatcattttggcaatgccaagtgcaacggctactgcaacgaatgctttcagttcaagcagatgtatggctaaccggaaacaggtgggtcacctcctgcaagaagtggggcctcgagctgtcagtcatcatggtgctatcctctgaacccctcagctgccactgcaacagtgggcttaagggtgtctgagcaggagaggaaagataagctcttcgtggtgcccacgatgctcaggtttggtaacccgggagtgttcccaggtggccttagaaagcaaagcttgtaactggcaagggatgatgtcagattcagcccaaggttcctcctctcctaccaagcaggaggccaggaacttctttggacttggaaggtgtgcggggactggccgaggcccctgcaccctgcgcatcaggactgcttcatcgtcttggctgagaaagggaaaagacacacaagtcgcgtgggttggagaagccagagccattccacctcccctcccccagcatctctcagagatgtgaagccagatcctcatggcagcgaggccctctgcaagaagctcaaggaagctcagggaaaatggacgtattcagagagtgtttgtagttcatggtttttccctacctgcccggttcctttcctgaggacccggcagaaatgcagaaccatccatggactgtgattctgaggctgctgagactgaacatgttcacattgacagaaaaacaagctgctctttataatatgcaccttttaaaaaattagaatattttactgggaagacgtgtaactctttgggttattactgtctttacttctaaagaagttagcttgaactgaggagtaaaagtgtgtacatatataatatacccttacattatgtatgagggatttttttaaattatattgaaatgctgccctagaagtacaataggaaggctaaataataataacctgttttctggttgttgttggggcatgagcttgtgtatacactgcttgcataaactcaaccagctgcctttttaaagggagctctagtcctttttgtgtaattcactttatttattttattacaaacttcaagattatttaagtgaagatatttccccagagctgaagaaatatcttcacttaaataatcttgaagtttgtaataaaataaataaagtgaattacacaaaaaggactagagctccctttaaaaaggcagctggttgagtttatgcaagcagtgtatacacaagctcatgccccaacaacaaccagaaaacaggttattattatttagccttcctattgtacttctagggcagcatttcaatataatttaaaaaaatccctcatacataatgtaagggtatattatatatgtacacacttttactcctcagttcaagctaacttctttagaagtaaagacagtaataacccaaagagttacacgtcttcccagtaaaatattctaattttttaaaaggtgcatattataaagagcagcttgtttttctgtcaatgtgaacatgttcagtctcagcagcctcagaatcacagtccatggatggttctgcatttctgccgggtcctcaggaaaggaaccgggcaggtagggaaaaaccatgaactacaaacactctctgaatacgtccattttccctgagcttccttgagcttcttgcagagggcctcgctgccatgaggatctggcttcacatctctgagagatgctgggggaggggaggtggaatggctctggcttctccaacccacgcgacttgtgtgtctttcccctttctcagccaagacgatgaagcagtcctgatgcgcagggtgcaggggcctcggccagtccccgcacaccttccaagtccaaagaagttcctggcctcctgcttggtaggagaggaggaaccttgggctgaatctgacatcatcccttgccagttacaagctttgctttctaaggccacctgggaacactcccgggttaccaaacctgagcatcgtgggcaccacgaagagcttatctttcctctcctgctcagacacccttaagcccactgttgcagtggcagctgaggggttcagaggatagcaccatgatgactgacagctcgaggccccacttcttgcaggaggtgacccacctgtttccggttagccatacatctgcttgaactgaaagcattcgttgcagtagccgttgcacttggcattgccaaaatgatcacaggcgggggcccggcaacgctgcttgggggggtcttcgggggcaggctcaccccggtgggccccagggcccatcctctggttgggatgctgacactccatgcagagctcctcgctgcggcaggccaggatgttcttgcaggaggcccgggcgcacttgggccttgaggtgctttgtgtggttcgaggcacatctctgcgctggctcgatctcagttgctcttctgtccttttggcctcatgaaatctctgattctgagcttcaatgaaacacttctggcagtatccttcaaacatggtgcttccaagggtgccgcattccctccccaggcacggaatggtgttctggaacctggacgctgtgggactgactttccctgaggcagcagcaaaatgtttgttttctctgtactcgatgaaacacagtgtgcaaaagcccttgttttctggagtcccaaaatacacgcagccggcttttctgcacttgctcgtccccgtcctgtccccaggagtccgtgcagcttgagacaggcagccagcaggggcgtcgtttccagctctgtggcaagaatgcggggaggggctccggacgagccgcgagggatctgacttggaacgctggtgacaggaaggagggaggctggtgctgaggctggaggaggcctctgctgtagtccttttgaagcaagtactgcagatcccattaaatgtcctggtaacatcctggaggcaggcttggcacttcccgggatccaagtgccttgtgtggtctggggcgtggctggcgtgaagttgccgggcgttgtggcaacgttcacaaaatccgttgtgctgcacattcagtgtgaaggggcagccggggctcctgcacttcatggcagtggtctcactgaacagaaaagggctgggtgctgtcggtggggccgaatgaggccccccagtggactcctcagggttccacgccaagggctcataggcttctccccgagaggccccgagcgccatgccagggagcccctcagggcccggcttggagttcagctttgggagtttgttttgattcttttgccgcctctctgagcactcatggcataaaggctgggtgttcacagacatgaagaaggggcagttgggcgtttcacattttacatccatgagagaaagctggggcacggaaggttccatgggattctgggcgtgcccctctctcctcccctgctcgctgttttcctgccatttcttgtactcatgctgaacaagttcaaagtaatcatctaccagattgatttcttttggtaagttagcttcatccaactttgcggcattgatgagatgagttgtgccatggtcccagccttggacggggatttctatcaccattaagtactcttttaagagcttctccttcatctcattttcaggatctgtcaaaaagtgaacttttaagtcttcaaatcttccccggtctctgttaacaagtggaacagctcggatttcaggcccactgtccttcagggtcaccaagggtacaaaatgatggctgtcatagccgagaacaatggggtatctgtagcattcctgggcaggccagtggagaggcaagtaaattccacccactttcaaaggggcgaaattggaacctgattccaaacttcttagcattttgtctgaaatgacaatgattggccttctgaggatgttgcaaaggacaaatatgtgtatttcttccagtgagttgtactgaagtccacttcgggccatgggtgtgtctgtggaagccattttgataagattgtcccattcatcattccagttccgagtatcatagcaaagccccgtttcaacaaattcctgagatttgagagactccagttgccagcggaatttaaagttgcgtgtgtctgtttccttgagcgtgctgaacagcgccttcctcagtaccaagtctgtgtcctgaacgccccacatgtactgagaagtggcatgcatgaggcaattgccgtcaccgttcgttttcagcgccacaagcttccggacttctcgacaccagttgagtttcttctggctttccagggtggcctggatgtttctgtcgatgagggctttgtggatgatctcccgaaactgaggacaaaactggcaagttctgaacatttccagtgtgtatcggtgcatggttttaaaatgatgaatgatcccattagtaggtttaaaaatgtcttctggagttctctcccgtatcttcacagctttccgcatattgctcaaatacaaagcctgaggaaggacttgttcagccattgtgctctccaacacctctccgggaggcgcggcggttacctctccgggccccgcgatcctttcgcaaagtcccaagtcctggtcaaggcaggagccgcgccgcaggcgggggtcggggcagggaccgggcggaggcgacgctccatggacgcctggggtcgggctcgctcgctggcagggtcggctgggggtgtgatctctcttggcggccgc

SEQ ID NO: 443 - DNA, 4588 bp, Homo sapiens
  misc_feature: Incyte ID No: 1750533CB1
gcggccgccaagagagatcacacccccagccgaccctgccagcgagcgagcccgaccccaggcgtccatggagcgtcgcctccgcccggtccctgccccgacccccgcctgcggcgcggctcctgccttgaccaggacttgggactttgcgaaaggatcgcggggcccggagaggtaaccgccgcgcctcccggagaggtgttggagagcacaatggctgaacaagtccttcctcaggctttgtatttgagcaatatgcggaaagctgtgaagatacgggagagaactccagaagacatttttaaacctactaatgggatcattcatcattttaaaaccatgcaccgatacacactggaaatgttcagaacttgccagttttgtcctcagtttcgggagatcatccacaaagccctcatcgacagaaacatccaggccaccctggaaagccagaagaaactcaactggtgtcgagaagtccggaagcttgtggcgctgaaaacgaacggtgacggcaattgcctcatgcatgccacttctcagtacatgtggggcgttcaggacacagacttggtactgaggaaggcgctgttcagcacgctcaaggaaacagacacacgcaactttaaattccgctggcaactggagtctctcaaatctcaggaatttgttgaaacggggctttgctatgatactcggaactggaatgatgaatgggacaatcttatcaaaatggcttccacagacacacccatggcccgaagtggacttcagtacaactcactggaagaaatacacatatttgtcctttgcaacatcctcagaaggccaatcattgtcatttcagacaaaatgctaagaagtttggaatcaggttccaatttcgcccctttgaaagtgggtggaatttacttgcctctccactggcctgcccaggaatgctacagataccccattgttctcggctatgacagccatcattttgtacccttggtgaccctgaaggacagtgggcctgaaatccgagctgttccacttgttaacagagaccggggaagatttgaagacttaaaagttcactttttgacagatcctgaaaatgagatgaaggagaagctcttaaaagagtacttaatggtgatagaaatccccgtccaaggctgggaccatggcacaactcatctcatcaatgccgcaaagttggatgaagctaacttaccaaaagaaatcaatctggtagatgattactttgaacttgttcagcatgagtacaagaaatggcaggaaaacagcgagcaggggaggagagaggggcacgcccagaatcccatggaaccttccgtgccccagctttctctcatggatgtaaaatgtgaaacgcccaactgccccttcttcatgtctgtgaacacccagcctttatgccatgagtgctcagagaggcggcaaaagaatcaaaacaaactcccaaagctgaactccaagccgggccctgaggggctccctggcatggcgctcggggcctctcggggagaagcctatgagcccttggcgtggaaccctgaggagtccactggggggcctcattcggccccaccgacagcacccagcccttttctgttcagtgagaccactgccatgaagtgcaggagccccggctgccccttcacactgaatgtgcagcacaacggattttgtgaacgttgccacaacgcccggcaacttcacgccagccacgccccagaccacacaaggcacttggatcccgggaagtgccaagcctgcctccaggatgttaccaggacatttaatgggatctgcagtacttgcttcaaaaggactacagcagaggcctcctccagcctcagcaccagcctccctccttcctgtcaccagcgttccaagtcagatccctcgcggctcgtccggagcccctccccgcattcttgccacagagctggaaacgacgcccctgctggctgcctgtctcaagctgcacggactcctggggacaggacggggacgagcaagtgcagaaaagccggctgcgtgtattttgggactccagaaaacaagggcttttgcacactgtgtttcatcgagtacagagaaaacaaacattttgctgctgcctcagggaaagtcagtcccacagcgtccaggttccagaacaccattccgtgcctggggagggaatgcggcacccttggaagcaccatgtttgaaggatactgccagaagtgtttcattgaagctcagaatcagagatttcatgaggccaaaaggacagaagagcaactgagatcgagccagcgcagagatgtgcctcgaaccacacaaagcacctcaaggcccaagtgcgcccgggcctcctgcaagaacatcctggcctgccgcagcgaggagctctgcatggagtgtcagcatcccaaccagaggatgggccctggggcccaccggggtgagcctgcccccgaagacccccccaagcagcgttgccgggcccccgcctgtgatcattttggcaatgccaagtgcaacggctactgcaacgaatgctttcagttcaagcagatgtatggctaaccggaaacaggtgggtcacctcctgcaagaagtggggcctcgagctgtcagtcatcatggtgctatcctctgaacccctcagctgccactgcaacagtgggcttaagggtgtctgagcaggagaggaaagataagctcttcgtggtgcccacgatgctcaggtttggtaacccgggagtgttcccaggtggccttagaaagcaaagcttgtaactggcaagggatgatgtcagattcagcccaaggttcctcctctcctaccaagcaggaggccaggaacttctttggacttggaaggtgtgcggggactggccgaggcccctgcaccctgcgcatcaggactgcttcatcgtcttggctgagaaagggaaaagacacacaagtcgcgtgggttggagaagccagagccattccacctcccctcccccagcatctctcagagatgtgaagccagatcctcatggcagcgaggccctctgcaagaagctcaaggaagctcagggaaaatggacgtattcagagagtgtttgtagttcatggtttttccctacctgcccggttcctttcctgaggacccggcagaaatgcagaaccatccatggactgtgattctgaggctgctgagactgaacatgttcacattgacagaaaaacaagctgctctttataatatgcaccttttaaaaaattagaatattttactgggaagacgtgtaactctttgggttattactgtctttacttctaaagaagttagcttgaactgaggagtaaaagtgtgtacatatataatatacccttacattatgtatgagggatttttttaaattatattgaaatgctgccctagaagtacaataggaaggctaaataataataacctgttttctggttgttgttggggcatgagcttgtgtatacactgcttgcataaactcaaccagctgcctttttaaagggagctctagtcctttttgtgtaattcactttatttattttattacaaacttcaagattatttaagtgaagatatttcttcagctctggggaaaatgccacagtgttctcctgagagaacatccttgctttgagtcaggctgtgggcaagttcctgaccacagggagtaaattggcctctttgatacacttttgcttgcctccccaggaaagaaggaattgcatccaaggtatacatacatattcatcgatgtttcgtgcttctccttatgaaactccagctatgtaataaaaaactatactctgtgttctgttaatgcctctgagtgtcctacctccttggagatgagatagggaaggagcagggatgagactggcaatggtcacagggaaagatgtggccttttgtgatggttttattttctgttaacactgtgtcctgggggggctgggaagtcccctgcatcccatggtaccctggtattgggacagcaaaagccagtaaccatgagtatgaggaaatctctttctgttgctggcttacagtttctctgtgtgctttgtggttgctgtcatatttgctctagaagaaaaaaaaaaaaaggaggggaaatgcattttccccagagataaaggctgccattttgggggtctgtacttatggcctgaaaatatttgtgatccataactctacacagcctttactcatactattaggcacactttccccttagagccccctaagtttttcccagacgaatctttataatttctttccaaagataccaaataaacttcagtgttttcatctaattctcttaaagttgatatcttaatattttgtgttgatcattatttccattcttaatgtgaaaaaaagtaattatttatacttattataaaaagtatttgaaatttgcacatttaattgtccctaatagaaagccacctattctttgttggatttcttcaagtttttctaaataaatgtaacttttcacaagagtcaacattaaaaaataaattatttaaaaaaaaaaaaaaa

SEQ ID NO: 444 - DNA, 2487 bp, Homo sapiens
  misc_feature: Incyte ID No: 1704944CB1
gggactgtgacatggagcaggagccgcccccagccaagctgctttcagcacagcgtgggcccccagcaccttggtgcggggtgcggcccctcggaggagggctgtcaggtgcctcaggaaccctgaagctgggctgagccatgatgctgctgccagaacccctgcagagggcctggtttcaggagactcagagtcctctgtgaaaaagcccttggagagcgccccagcagggctgcacttggctcctgtgaggaaggggctcaggggtctgggcccctccgcctgggccgggctgggagccaggcgggcggctgggctgcagcaatggaccgtgagctggcccagcccgcgtccgtgctgagcctgcctgtcgtctgtggccatgcccatcatgggctcctcggtgtacatcacggtggagctggccattgctgtgctggccatcctgggcaatgtgctggtgtgctgggccgtgtggctcaacagcaacctgcagaacgtcaccaactactttgtggtgtcactggcggcggccgacatcgcagtgggtgtgctcgccatcccctttgccatcaccatcagcaacgggttctgcgctgcctgccacggctgcctcttcattgcctgcttcgtcctggtcctcacgcagagctccatcttcagtctcctggccatcgccattgaccgctacattgccatccgcatcccgctccggtacaatggcttggtgaccggcacgagggctaagggcatcattgccatctgctgggtgctgtcgtttgccatcggcctgactcccatgctaggttggaacaactgcggtcagccaaaggagggcaagaaccactcccagggctgcggggagggccaagtggcctgtctctttgaggatgtggtccccatgaactacatggtgtacttcaacttctttgcctgtgtgctggtgcccctgctgctcatgctgggtgtctatttgcggatcttcctggcggcgcgacgacagctgaagcagatggagagccagcctctgccgggggagcgggcacggtccacactgcagaaggaggtccatgctgccaagtcactggccatcattgtggggctctttgccctctgctggctgcccctacacatcatcaactgcttcactttcttctgccccgactgcagccacgcccctctctggctcatgtacctggccatcgtcctctcccacaccaattcggttgtgaatcccttcatctacgcctaccgtatccgcgagttccgccagaccttccgcaagatcattcgcagccacgtcctgaggcagcaagaacctttcaaggcagctggcaccagtgcccgggtcttggcagctcatggcagtgacggagagcaggtcagcctccgtctcaacggccacccgccaggagtgtgggccaacggcagtgctccccaccctgagcggaggcccaatggctacgccctggggctggtgagtggagggagtgcccaagagtcccaggggaacacgggcctcccagacgtggagctccttagccatgagctcaagggagtgtgcccagagccccctggcctagatgaccccctggcccaggatggagcaggagtgtcctgatgattcatggagtttgccccttcctaagggaaggagatctttatctttctggttggcttgaccagtcacgttgggagaagagagagagtgccaggagaccctgagggcagccggttcctactttggactgagagaagggagccccaggctggagcagcatgaggcccagcaagaagggcttgggttctgaggaagcagatgtttcatgctgtgaggccttgcaccaggtgggggccacagcaccagcagcatctttgctgggcagggcccagccctccactgcagaagcatctggaagcaccaccttgtctccacagagcagcttgggcacagcagactggcctggccctgagactggggagtggctccaacagcctcctgccacccacacaccactctccctagactctcctagggttcaggagctgctgggcccagaggtgacatttgactttttttccaggaaaaatgtaagtgtgaggaaaccctttttattttattacctttcactctctggctgctgggtctgccgtcggtcctgctgctaacctggcaccagagcctctgcccggggagcctcaggcagtcctctcctgctgtcacagctgccatccacttctcagtcccagggccatctcttggagtgacaaagctgggatcaaggacagggagttgtaacagagcagtgccagagcatgggcccaggtcccaggggagaggttggggctggcaggccactggcatgtgctgagtagcgcagagctacccagtgagaggccttgtctaactgcctttccttctaaagggaatgtttttttctgagataaaataaaaacgagccacatcgtgttttaagcccttgtgat

SEQ ID NO: 445 - DNA, 1728 bp, Homo sapiens
  misc_feature: Incyte ID No: 201752.1
  unsure 1438, 1449, 1451, 1455, 1457, 1459, 1461, 1491, 1494, 1500, 1515,1528-1529, 1536, 1541-1542, 1557-1558, 1566, 1568, 1572, 1596-1597, 1611,1615, 1647, 1666, 1672, 1699: a, t, c, g, or other
gccactgctctgagaatttgtgagcagcccctaacaggctgttacttcactacaactgacgatatgatcatcttaatttacttatttctcttgctatgggaagacactcaaggatggggattcaaggatggaatttttcataactccatatggcttgaacgagcagccggtgtgtaccacagagaagcacggtctggcaaatacaagctcacctacgcagaagctaaggcggtgtgtgaatttgaaggcggccatctcgcaacttacaagcagctagaggcagccagaaaaattggatttcatgtctgtgctgctggatggatggctaagggcagagttggataccccattgtgaagccagggcccaactgtggatttggaaaaactggcattattgattatggaatccgtctcaataggagtgaaagatgggatgcctattgctacaacccacacgcaaaggagtgtggtggcgtctttacagatccaaagcaaatttttaaatctccaggcttcccaaatgagtacgaagataaccaaatctgctactggcacattagactcaagtatggtcagcgtattcacctgagttttttagattttgaccttgaagatgacccaggttgcttggctgattatgttgaaatatatgacagttacgatgatgtccatggctttgtgggaagatactgtggagatgagcttccagatgacatcatcagtacaggaaatgtcatgaccttgaagtttctaagtgatgcttcagtgacagctggaggtttccaaatcaaatatgttgcaatggatcctgtatccaaatccagtcaaggaaaaaatacaagtactacttctactggaaataaaaactttttagctggaagatttagccacttataaaaaaaaaaaaaggatgatcaaaacacacagtgtttatgttggaatcttttggaactcctttgatctcactgttattattaacatttatttattatttttctaaatgtgaaagcaatacataatttagggaaaattggaaaatataggaaactttaaacgagaaaatgaaacctctcataatcccactgcatagaaataacaagcgttaacattttcatatttttttctttcagtcatttttctatttgtggtatatgtatatatgtacctatatgtatttgcatttgaaattttggaatcctgctctatgtacagttttgtattatactttttaaatcttgaactttataaacattttctgaaatcattgattattctacaaaaacatgattttaaacagctgtaaaatattctatgatatgaatgttttatgcattatttaagcctgtctctattgttggaatttcaggtcattttcataaatattgttgcaataaatatccttgaacacacatattgtgcacctctctaattatttaanacaaggacctngnaatngnantnctgaatcaaaggttaattccaataaaattntcngttttnataggcaaaaatgangcctcactgtagnntgaattngcatnnctttattcatgaganngatggttntntaantttttgttaattttttttgtgaannatttttccatgccntttngtcactatttttaaaaactgatataatcttcnctattgatttgttagaaantattanatatgtccatgtttgtcatatatgctntaatttaatttttagtttatattttgtct

SEQ ID NO: 446 - DNA, 1144 bp, Homo sapiens
  misc_feature: Incyte ID No: 191918CB1
gagaatttgtgagcagcccctaacaggctgttacttcactacaactgacgatatgatcatcttaatttacttatttctcttgctatgggaagacactcaaggatggggattcaaggatggaatttttcataactccatatggcttgaacgagcagccggtgtgtaccacagagaagcacggtctggcaaatacaagctcacctacgcagaagctaaggcggtgtgtgaatttgaaggcggccatctcgcaacttacaagcagctagaggcagccagaaaaattggatttcatgtctgtgctgctggatggatggctaagggcagagttggataccccattgtgaagccagggcccaactgtggatttggaaaaactggcattattgattatggaatccgtctcaataggagtgaaagatgggatgcctattgctacaacccacacgcaaaggagtgtggtggcgtctttacagatccaaagcaaatttttaaatctccaggcttcccaaatgagtacgaagataaccaaatctgctactggcacattagactcaagtatggtcagcgtattcacctgagttttttagattttgaccttgaagatgacccaggttgcttggctgattatgttgaaatatatgacagttacgatgatgtccatggctttgtgggaagatactgtggagatgagcttccagatgacatcatcagtacaggaaatgtcatgaccttgaagtttctaagtgatgcttcagtgacagctggaggtttccaaatcaaatatgttgcaatggatcctgtatccaaatccagtcaaggaaaaaatacaagtactacttctactggaaataaaaactttttagctggaagatttagccacttataaaaaaaaaaaaaggatgatcaaaacacacagtgtttatgttggaatcttttggaactcctttgatctcactgttattattaacatttatttattatttttctaaatgtgaaagcaatacataatttagggaaaattggaaaatataggaaactttaaacgagaaaatgaaacctctcataatcccactgcatagaaataacaagcgttaacatttgcatatttttttctttcagtcattttagaatttgtggtatatga

SEQ ID NO: 447 - DNA, 1965 bp, Homo sapiens
  misc_feature: Incyte ID No: 1511540CB1
  unsure 1937: a, t, c, g, or other
ggttactatggcggagtcggccggagcctcctccttcttcccccttgttgtcctcctgctcgccggcagcggcgggtccgggccccggggggtccaggctctgctgtgtgcgtgcaccagctgcctccaggccaactacacgtgtgagacagatggggcctgcatggtttccattttcaatctggatgggatggagcaccatgtgcgcacctgcatccccaaagtggagctggtccctgccgggaagcccttctactgcctgagctcggaggacctgcgcaacacccactgctgctacactgactactgcaacaggatcgacttgagggtgcccagtggtcacctcaaggagcctgagcacccgtccatgtggggcccggtggagctggtaggcatcatcgccggcccggtgttcctcctgttcctcatcatcatcattgttttccttgtcattaactatcatcagcgtgtctatcacaaccgccagagactggacatggaagatccctcatgtgagatgtgtctctccaaagacaagacgctccaggatcttgtctacgatctctccacctcagggtctggctcagggttacccctctttgtccagcgcacagtggcccgaaccatcgttttacaagagattattggcaagggtcggtttggggaagtatggcggggccgctggaggggtggtgatgtggctgtgaaaatattctcttctcgtgaagaacggtcttggttcagggaagcagagatataccagacggtcatgctgcgccatgaaaacatccttggatttattgctgctgacaataaagataatggcacctggacacagctgtggcttgtttctgactatcatgagcacgggtccctgtttgattatctgaaccggtacacagtgacaattgaggggatgattaagctggccttgtctgctgctagtgggctggcacacctgcacatggagatcgtgggcacccaagggaagcctggaattgctcatcgagacttaaagtcaaagaacattctggtgaagaaaaatggcatgtgtgccatagcagacctgggcctggctgtccgtcatgatgcagtcactgacaccattgacattgccccgaatcagagggtggggaccaaacgatacatggcccctgaagtacttgatgaaaccattaatatgaaacactttgactcctttaaatgtgctgatatttatgccctcgggcttgtatattgggagattgctcgaagatgcaattctggaggagtccatgaagaatatcagctgccatattacgacttagtgccctctgacccttccattgaggaaatgcgaaaggttgtatgtgatcagaagctgcgtcccaacatccccaactggtggcagagttatgaggcactgcgggtgatggggaagatgatgcgagagtgttggtatgccaacggcgcagcccgcctgacggccctgcgcatcaagaagaccctctcccagctcagcgtgcaggaagacgtgaagatctaactgctccctctctccacacggagctcctggcagcgagaactacgcacagctgccgcgttgagcgtacgatggaggcctacctctcgtttctgcccagccctctgtggccaggagccctggcccgcaagagggacagagcccgggagagactcgctcactcccatgttgggtttgagacagacaccttttctatttacctcctaatggcatggagactctgagagcgaattgtgtggagaactcagtgccacacctcgaactggttgtagtgggaagtcccgcgaaacccggtgcatctggcacgtggccaggagccatgacaggggcgcttgggagggcccggagaaccgagtgttgccagtgctaagctgccctgagggtttcttcgggtgacaagccacagcacaccaangttgcccggaaagtctcagagtgcagcc

SEQ ID NO: 448 - DNA, 3690 bp, Homo sapiens
  misc_feature: Incyte ID No: 2314132CB1
gcagcggatcacagcctttccccgatcctctccgtgggagccagcgagcctctctccctgatcttacgtgctcaagaagctgttgtgaaggcagagcagcatctgctgaagagacagaaaccagccccagaggtgtcacaggaaggcaccagcaaggacattggtctttgatttgattcagcagtcctgtcaagtataaatgtgatggctgtgctgcctggccctctgcagctgctgggagtgctgcttaccatttccctgagttccatcaggctcattcaggctggtgcctactatgggatcaagccgctgccacctcaaattcctcctcagatgccaccacaaattccacaataccagcccctgggtcagcaagtacctcacatgcctttggccaaagatggccttgccatgggcaaggagatgccccacttgcagtatggcaaagagtatccacacctaccccaatatatgaaggaaattcaaccggcgccaagaatgggcaaggaagccgtacccaagaaaggcaaagtagaaataccattagccagtttacgaggggaacaaggtccccgtggagagcctggcccaagaggaccacctgggccccctggtttgccaggtcatgggatacctggaattaaaggaaaaccagggccacagggatatccaggagttggaaagccaggtatgcctggaatgccagggaagccaggagccatgggcatgcctggggcaaaaggagaaattggacagaaaggggaaattgggcctatggggatcccaggaccacaaggacctccagggcctcatggacttcctggcattgggaagccaggtgggccagggttaccagggcaaccaggaccaaagggtgatcgaggacccaaaggactaccaggacctcaaggccttcggggtcctaaaggagacaagggcttcgggatgccaggtgcgccaggtgtaaaggggcctccagggatgcacggccctcccggccctgttggactgccaggagtgggcaaaccaggagtgacaggcttccctgggccccagggccccctgggaaagccaggggctccaggagaacccggtcgacaaggccctattggggtaccgggggttcaaggacctcctgggatacccggaattggaaagccaggccaggatgggatcccaggccagccaggatttccaggtggcaaaggggagcaaggactgccagggctaccaggacccccaggccttccagggattgggaaaccaggcttcccaggacccaaaggtgaccggggcatgggaggtgttcctggggctcttggaccaagaggggagaaaggaccaataggtgccccaggaatagggggtcctccaggagagccaggcctgcctggaatcccaggtcctatgggccctccaggtgctattggttttcctggacccaaaggagaaggtgggattgtagggccacaggggccaccaggtcccaagggtgagccagggcttcaaggcttcccaggaaagccaggtttccttggtgaagtagggcctcctggcatgaggggtttgccaggtcccataggccccaagggggaacatgggcaaaaaggactaccaggactccctggtgttccagggcttctcggacctaagggagagccaggaatcccaggggatcagggtttacagggccccccaggtatcccagggattgggggccctagtggccccattggaccacctgggattccaggccccaaaggggagccgggcctcccagggccccctgggttccctggtatagggaaacccggagtggcaggacttcatggccccccagggaagcctggtgcccttggtcctcaaggccagcctggccttccaggacccccaggccctccaggacctccaggacccccagctgtgatgccccctacaccaccaccccagggagagtatctgccagatatggggctgggaattgatggcgtgaaacccccccatgcctacggggctaagaaaggcaagaatggagggccagcctatgagatgcctgcatttaccgccgagctaaccgcacctttcccaccggtgggggccccagtgaagtttaacaaactgctgtataacggcagacagaactacaacccgcagacaggcatcttcacctgtgaggtccctggtgtctactactttgcataccacgttcactgcaaggggggcaacgtgtgggttgctctattcaagaacaacgagcccgtgatgtacacgtacgacgagtacaaaaagggcttcctggaccaggcatctgggagtgcagtgctgctgctcaggcccggagaccgggtgttcctccagatgccctcagaacaggctgcaggactgtatgccgggcagtatgtccactcctccttttcaggatatttattgtatcccatgtaaaaacaaaaaaacaaaaaacaaagaaaagaaagagattttatagaagaaaatgacacaccaaaaaatccaaatgaaaaacataattgcttcaaaacacttacacagttggaaagttatatgtaagtgaaaatttggaccattgtgtacaaataaaaactaagatgcatgtttaatactccacacagcagcctgtaattgcgaatgatgggatagagttatgtatcaagtactgacacttggttgtacccactggaatcatattagctgttttatgttatatgcttccacagtaacctgcttattcagatcagtcaaaatatatcagtatgaaagatcatagctaatgaaaggcactcactcatattgtttactttaaaatatttataaatatgccttaaagaaatacaaatgataacaattacataccgtatttacttgcttaatttcctctgtatttgtgtagatactttgacatggaatatatggtggggagacccgtagtgttaccgccccagtgggagggggccctggggaccctggtaatgctttagtcaaagggatatctctcttgtatcagaggctgtgtcttttagtaacaggagtcctcgtcagaattgcgtgtctgttgtctctaaaagaatgggtgaaccaatcggcctttgtgaatttattcagtgccttctctgtaccaagcactgggtaaggcacttttgtggagcattagacagtaaccctcaaggagctagagaaccggatgggagacatgagcagtaattaactcacttgttccccagagtttctatttgttttgattttctttttctgtgacttattttcctattttctttcctccatgtaattttcactatggcccaactaatataaacacctggaaattacaaggaaaaaaaattcttcctctaataactttccaaatttgtggaatatttatttgtaatagcagttatcagttatgcttatatagcattaaaaattctcctcctttgactacacacacaaccacagtgtggttctaatcatggagatatcagtaatttttagtaactgaattttgaggacatttctctgtttagcatgtatgcaaactgatatgtaatctgaggttccaaagtcaatttttttcttttttttttgagatggagtcttactctgtcaccccaggcctggagtggcagtagcacggatcttgggcttacctgcaaccttctaaccttcctagggttccag

SEQ ID NO: 449 - DNA, 2230 bp, Homo sapiens
  misc_feature: Incyte ID No: 407639.3
ctcgcaggcgcgtagcactgtgagcttcctctcccggcacagagcaggcagagccggggacgttactctccaagcagcctccgccccctcagcctggtgattggctttgcgcagcgtttatctcctagcaagagggaagggccagtgacgcccccgaacccagctgcagaagctgccgccacctccaatgcacaaggtgtctcatctgaaaagaaacctgagccccagggaggcggcgcggagcggaccctggcagagctggcgcaaacagggcgagaggtcgctgggcagcgttcgaggaccagagggagctcggccacagaagaccccagtgatctgatcccgggatcccggctccaagctctcctcgcattttacagatttcacccccgcgactatctccccaaaacggagcctttatatcaagagaaggtgcgggagctggggcaaccaggactttctcgggcacccaagatgcgctccattaggaagaggtggacgatctgcacaataagtctgctcctgatcttttataagacaaaagaaatagcaagaactgaggagcaccaggagacgcaactcatcggagatggtgaatggtctttgagtcggtcacttgtcaatagctctgataaaatcattcgaaaggctggctcttcaatcttccagcacaatgtagaaggttggaaaatcaattcctctttggtcctagagataaggaagaacatacttcgtttcttagatgcagaacgagatgtgtcagtggtcaagagcagttttaagcctggtgatgtcatacactatgtgcttgacaggcgccggacactaaacatttctcatgatctacatagcctcctacctgaagtttcaccaatgaagaatcgcaggtttaagacctgtgcagttgttggaaattctggcattctgttagacagtgaatgtggaaaggagattgacagtcacaattttgtaataaggtgtaatctagctcctgtggtggagtttgctgcagatgtgggaactaaatcagattttattaccatgaatccatcagttgtacaaagagcatttggaggctttcgaaatgagagtgacagagaaaaatttgtgcatagactttccatgctgaatgacagtgtcctttggattcctgctttcatggtcaaaggaggagagaagcacgtgggagtggggttaatgcattaatccttaagaataaactgaaagtgcgaactgcctatccgtcattgagacttattcatgctgtcagaggttactggctgaccaacaaagttcctatcaaaagacccagcacaggtcttctcatgtatacacttgccacaagattctgtgatgaaattcacctgtatggattctggcccttccctaaggatttaaatggaaaagcggtcaaatatcattattatgatgacttaaaatataggtacttttccaatgcaagccctcacagaatgccattagaattcaaaacattaaatgtgctacataatagaggagctctaaaactgacaacaggaaagtgtgtaaagcaataaagcacattttgaaacaaacaatatgcacttcttttctgagatgcttccgaagatttgaaaataggatccaaaacacggctgggtttcagcatccaccaatgaactgaaaggtgaataaaggacgttcatgagaaatcgactaccagctgatgaaatacctgcaaagtgctctaaaaattaaatattttgactttaagggtcctagtaagtgccacttccactaagaatacagtttgaatgtataatcagtagtgtttacaagatccaacagtgcactcatcattagttaacaaagcaaatatgttcatcactgtcaggctgcccacagcaacaccaagcatattagaagaggaaccccaggaacgcaactcagaccttgggaaattaaaccatccttgtcagcagaagccaagatggaagcagtttgagcaatgaaatccgtaagattaaacaactcaagtaaatgcttcagtcaggactctgagtctgatcatgaattttatgttttaatttatgtttttttttttgtcttctggaatctcttttggtttggatattgggatgcttagaaatcctttctgagatgcatatgagtgaggaaataaactttaagtaattatttttaaagttcttatactttttaaaagctatcacacaaagactttttttttttt

SEQ ID NO: 450 - DNA, 2280 bp, Homo sapiens
  misc_feature: Incyte ID No: 351158.4
  unsure 1282: a, t, c, g, or other
ccccgagtctctgcgccttcacatagttgtcacaggactaaagcaaattgatccagggggaaacactgtagaccgtgtatataaaaacactctataaactgcaatgctcaattcttagtataactattgttgttgtattgatatttattagtattggtgctcacaaaaagagtctaaattccataagtctttatattcaggctactctttatttttgaaaactcattttctatcacctttttctattttactccatattgaggcctcataaatccaattttttatttctttcttttgtaaatgtggtttctacaaagatgaaactactaaaacttacaggttttatttttttcttgttttttttgactgaatccctaaccctgcccacacaacctcgggatatagagaacttcaatagtactcaaaaatttatagaagataatattgaatacatcaccatcattgcatttgctcagtatgttcaggaagcaacctttgaagaaatggaaaagctggtgaaagacatggtagaatacaaagacagatgtatggctgacaagacgctcccagagtgttcaaaattacctaataatgttttacaggaaaaaatatgtgctatggaggggctgccacaaaagcataatttctcacactgctgcagtaaggttgatgctcaaagaagactctgtttcttctataacaagaaatctgatgtgggatttctgcctcctttccctaccctggatcccgaagagaaatgccaggcttatgaaagtaacagagaatcccttttaaatcactttttatatgaagttgccagaaggaacccatttgtcttcgcccctacacttctaactgttgctgttcattttgaggaggtggccaaatcatgttgtgaagaacaaaacaaagtcaactgccttcaaacaagggcaatacctgtcacacaatatttaaaagcattttcttcttatcaaaaacatgtctgtggggcacttttgaaatttggaaccaaagttgtacactttatatatattgcgatactcagtcaaaaattccccaagattgaatttaaggagcttatttctcttgtagaagatgtttcttccaactatgatggatgctgtgaaggggatgttgtgcagtgcatccgtgacacgagcaaggttatgaaccatatttgttcaaaacaagattctatctccagcgaaatcaaagagtgctgtgaaaagaaaataccagagcgcggccagtgcataattaactcaaacaaagatgatanacctatggatttatctctaagagaaggaaaatttactgacagtgaaaatgtgtgcaagaacgagatgctgacccagacaccttctttgcgaagtttacttttgaatactcaaggagacatccagacctgtctataccagagcttttaagaattgttcaaatatacaaagatctcctgagaaattgctgcaacacagaaaaccctccaggttgttaccgttacgcggaagacaaattcaatgagacaactgagaaaagcctcaagatggtacaacaagaatgtaaacatttccagaatttggggaaggatggtttgaaataccattacctcatcaggctcacgaagatagctccccaactctccactgaagaactggtgtctcttggcgagaaaatggtgacagctttcactacttgctgtacgctaagtgaagagtttgcctgtgttgataatttggcagatttagtttttggagagttatgtggagtaaatgaaaatcgaactatcaaccctgctgtggaccactgctgtaaaacaaactttgccttcagaaggccctgctttgagagtttgaaagctgataaaacatatgtgcctccacctttctctcaagatttatttacctttcacgcagacatgtgtcaatctcagaatgaggagcttcagaggaagacagacaggtttcttgtcaacttagtgaagctgaagcatgaactcacagatgaagagctgcagtctttgtttacaaatttcgcaaatgtagtggataagtgctgcaaagcagagagtcctgaagtctgctttaatgaagagagtccaaaaattggcaactgaagccagctgctggagatatgtaaagaaaaaagcaccaaagggaaggcttcctatctgtgtggtgatgaatcgcatttcctgagaacaaaataaaaggatttttctgtaactgtcacctgaaataatacattgcagcaagcaataaacacaacattttgtaaagt

SEQ ID NO: 451 - DNA, 3900 bp, Homo sapiens
  misc_feature: Incyte ID No: 1382958.26
ctttccagaaagcaacaacagcaggagtctgcacgcagggaaaacatccttgtaatgcgactagcaaccaaggaacaagagatgcaagagtgtactactcaaatccagtacctcaagcaagtccagcagccgagcgttgcccaactgagatcaacaatggtagacccagcgatcaacttgtttttcctaaaaatgagtccgagtgtgtgagcttgagagccgcgcgctagagcgacccggcgagggatggcggccaccgggaccgcggccgccgcagccacgggcaggctcctgcttctgctgctggtggggctcacggcgcctgccttggcgctggccggctacatcgaggctcttgcagccaatgccggaacaggatttgctgttgctgagcctcaaatcgcaatgttttgtgggaagttaaatatgcatgtgaacattcagactgggaaatgggaacctgatccaacaggcaccaagagctgctttgaaacaaaagaagaagttcttcagtactgtcaggagatgtatccagagctacagatcacaaatgtgatggaggcaaaccagcgggttagtattgacaactggtgccggagggacaaaaagcaatgcaagagtcgctttgttacacctttcaagtgtctcgtgggtgaatttgtaagtgatgtcctgctagttccagaaaagtgccagtttttccacaaagagcggatggaggtgtgtgagaatcaccagcactggcacacggtagtcaaagaggcatgtctgactcagggaatgaccttatatagctacggcatgctgctcccatgtggggtagaccagttccatggcactgaatatgtgtgctgccctcagacaaagattattggatctgtgtcaaaagaagaggaagaggaagatgaagaggaagaggaagaggaagatgaagaggaagactatgatgtttataaaagtgaatttcctactgaagcagatctggaagacttcacagaagcagctgtggatgaggatgatgaggatgaggaagaaggggaggaagtggtggaggaccgagattactactatgacaccttcaaaggagatgactacaatgaggagaatcctactgaacccggcagcgacggcaccatgtcagacaaggaaattactcatgatgtcaaagctgtctgctcccaggaggcgatgacggggccctgccgggccgtgatgcctcgttggtacttcgacctctccaagggaaagtgcgtgcgctttatatatggtggctgcggcggcaacaggaacaattttgagtctgaggattattgtatggctgtgtgtaaagcgatgattcctccaactcctctgccaaccaatgatgttgatgtgtatttcgagacctctgcagatgataatgagcatgctcgcttccagaaggctaaggagcagctggagattcggcaccgcaaccgaatggacagggtaaagaaggaatgggaagaggcagagcttcaagctaagaacctccccaaagcagagaggcagactctgattcagcacttccaagccatggttaaagctttagagaaggaagcagccagtgagaagcagcagctggtggagacccacctggcccgagtggaagctatgctgaatgaccgccgtcggatggctctggagaactacctggctgccttgcagtctgacccgccacggcctcatcgcattctccaggccttacggcgttatgtccgtgctgagaacaaagatcgcttacataccatccgtcattaccagcatgtgttggctgttgacccagaaaaggcggcccagatgaaatcccaggtgatgacacatctccacgtgattgaagaaaggaggaaccaaagcctctctctgctctacaaagtaccttatgtagcccaagaaattcaagaggaaattgatgagctccttcaggagcagcgtgcagatatggaccagttcactgcctcaatctcagagacccctgtggacgtccgggtgagctctgaggagagtgaggagatcccaccgttccaccccttccaccccttcccagccctacctgagaacgaagacactcagccggagttgtaccacccaatgaaaaaaggatctggagtgggagagcaggatgggggactgatcggtgccgaagagaaagtgattaacagtaagaataaagtggatgaaaacatggtcattgacgagactctggatgttaaggaaatgattttcaatgccgagagagttggaggcctcgaggaagagcgggaatccgtgggcccactgcgggaggacttcagtctgagtagcagtgctctcattggcctgctggtcatcgcagtggccattgccacggtcatcgtcatcagcctggtgatgctgaggaagaggcagtatggcaccatcagccacgggatcgtggaggttgatccaatgctcaccccagaagagcgtcacctgaacaagatgcagaaccatggctatgagaaccccacctacaaatacctggagcagatgcagatttaggtggcagggagcgcggcagccctggcggagggatgcaggtgggccggaagatcccacgattccgatcgactgccaagcagcagccgctgccaggggctgcgtctgacatcctgacctcctggactgtaggactatataaagtactactgtagaactgcaatttccattcttttaaatgggtgaaaaatggtaatataacaatatatgatatataaaccttaaatgaaaaaaatgatctattgcagatatttgatgtagttttcttttttaaattaatcagaaaccccacttccattgtattgtctgacacatgctctcaatatataataaatgggaaatgtcgattttcaataatagacttatatgcaggctgtcgttccggttatgttgtgtaagtcaactcttcagcctcattcactgtcctggcttttatttaaagaaaaaaaaggcagtattccctttttaaatgagctttcaggaagttgctgagaaatggggtggaatagggaactgtaatggccactgaagcacgtgagagaccctcgcaaaatgatgtgaaaggaccagtttcttgaagtccagtgtttccacggctggatacctgtgtgtctccataaaagtcctgtcaccaaggacgttaaaggcattttattccagcgtcttctagagagcttagtgtatacagatgagggtgtccgctgctgctttccttcggaatccagtgcttccacagagattagcctgtagcttatatttgacattcttcactgtctgttgtttacctaccgtagctttttaccgttcacttccccttccaactatgtccagatgtgcaggctcctcctctctggactttctccaaaggcactgaccctcggcctctactttgtcccctcacctccaccccctcctgtcaccggccttgtgacattcactcagagaagaccacaccaaggaggcggccgctggcccaggagagaacacggggaggtttgtttgtgtgaaaggaaagtagtccaggctgtccctgaaactgagtctgtggacactgtggaaagctttgaacaattgtgttttcgtcacaggagtctttgtaatgcttgtacagttgatgtcgatgctcactgcttctgctttttctttctttttattttaaatctgaaggttctggtaacctgtggtgtatttttattttcctgtgactgtttttgttttgtttttttcctttttcctcccctttgaccctattcatgtctctacccactatgcacagattaaacttcacctacaaactccttaatatgatctgtggagaatgtacacagtttaaacacatcaataaatactttaacttccaccgaa

SEQ ID NO: 452 - DNA, 3318 bp, Homo sapiens
  misc_feature: Incyte ID No: 199489.1
  unsure 1255, 1299: a, t, c, g, or other
gcttgggaacatgagtgttacaagttagctggtgttttactattattgtgttacatttttccagtgtcgtcattaatcggtggcatatactgcacatactgaaatagagggaaatcactgaatgtaaagaggtttcatctatgccccctgcagttggggaaatactagtagctttaccttgtttgacttcattaatgtcagtttaggggatgccaaaaatgcagttactcatcatggtgtctgtcactggttaggggtaagatgaggggataaggaaagagacttttcaataagttgtgaatgccaacagtgggtttaatgcaaattttttttcctgtgaggtatgacagtttgctcaaacttcagccaacaggggtgtctgcttctgctgcactacacaggccaggagtggcattccatgccactagttggcatccttttgaacttttgtctcctttgcaaacagtggtcctaaaatacgaggtcttcacttgctgtgaatgacgtatccccagtcagggacttaagagaggcactgtgatatacttgggaccctttaaattaaaaagtgaagatagtcaccagggccagaaagctcatggagtggccgtaatgagaatatgtttgaagatcaaagagttagaccaatgcttgaataagtagaccccaagcatccttttctaaaaagtgacttaaaataagccaacagactctcccagaccacacaactagtggaatgattcctcctttttccattacttacttaatcacagtttagtttttttcttaacctcgtcaggcccagagttcacttctttgtttctctgtttcttttgtcttgtcttagagatgagggggctacagcagcatcatgcaaagagggaaagatgaagggatagaagaagagaaaatccccctgttctgataggaacggcctgttccattgttaaatggcaaatggcccaatttaagggctttggatctaatttgcctctgatgtttcctttggaaacatttaggaatatttttctccccctaccccataaattgtgtagcactttttattcctatttgctttcaaatgactacactaagcctaataatacaagctccagtgttatacaataacccatcagtgattggggaatcaaacattttggtttaaaaaacatgattatttaaaactggaaactaaaaagaatcaaattgaattaaagctatataaacacagttaacccttgtaaatgagtaaacnaatttttacatgtaagattctctaattagtcatattttactttntaggattccctaatagtggactgtttatttgcagtgtatttgcttctcatgaactatttctcgtacaaatcattaaatagttcattggatgaggctgggtgacatttcccaggacagcatggtgaacattaccaggcatgctagctggcccgtgtaatcccaagacaaggaaaacattcgttttcctcatgggtcttccaagaaatgagctattttattgatgccattaaaaagcaagttgcgatggttttgtatagccaggagtttattgtgattaaacatcaaagaaacaggtagaaagcctgggtttctggctgctagcgttatagcatccatgacacagaactcattacggacattccacaacttccagggtgcacatggtaaaatctgaagcccagaattttctctcaagctgcgtggtttactggagagaaggagttggataagcacaggctcgggtattttggtagggactgtaggcatgctcataaatccttgctgttgtcacagtacgctgaaaacccgtttgattctatacccaatcaagaatagacccttcacacaggaaatgtgaacaattgttatatatgaacactcaaatcttttactgtaacgaaaccaagaaacttgtttagaatgtgataggcagctaaaactgttatgcccactgtgctcaatttgaagcagaattcagtgaaaaattatttttccacattgaaacactttgcagacacaaatatctatgaaaagatgctttgtcagccactgtgcctttttttctgtgaagactcaacggatgtgtgtgtttgtatgtttgttaacagttacatatgtttgtatgagtgtatatatatatctgtgtgtgtgtatctctaacgtcagtgtataagtaagttgggtttatggtgggctttgactatgtcattaggtgggtacaaaacccaactgatgtggagaaaaattgatgtttgatgttgatagatatgcttatacctaatttttagtttttaaactattttaaaatatactatgattttatatgtatatttcctatagactctttaagacgtatttataatgtttctaatatgaaatcactaaactctagtacattatagcaggtgctttgtaatctggaatggagaagaggtaggggcatttggggattcctgtttacttgctgctgccacaccttttccgactgatctgtcctggtaggtgtttattagcaaaagtcagtatcaccagctctttggcacctttctgtttctgcttgtgaattcataatgttttcaactaaattttttttttactttctcagaattacctaaatgttttgtagagttttgactagtaatcaatcaaaattatataaagtcttctccagtaattaagaaatacatatgcaaattcttttgtgattgagtaaaagcagcttaaattacttttcttttctacattaagaaatatattctcaacattttcagtgagaatttcttgtaatggcacctcaaattttatactcttaaaaaaaaacaataatttgtgaattaccaccaaaaggcaatggcagtcctacatttaagaatagagctatgcaaactctgttaaaaactatgaggaaaacttatattagaacttttgatatatactaaaatactgattatcttaatcacattttccccagagataaacattgagagaacgaaagccaaagtgtcatttaagagagatatatatgaaaaagtaacattaatatatagaactttaccatcaccagccgtagttgatagaaaatattagtttcagaattaccctcctttaaaaaataagagactatttgttttcttttaatttctatgaataaaagaaatttttaaaaactttaaaattttaaatattagtcaaaatactttttaagtcctgagtgcttacaggtagttgttaaaaaaattttaaggccaggcatggtggctcgctcacacctataatcctaggatctgggaggtcgaggca

SEQ ID NO: 453 - DNA, 1020 bp, Homo sapiens
  misc_feature: Incyte ID No: 481231.21
ggtgcgtcctgctgcctgccccggtcactctggctccccagctcaaggttcaggccttgccccaggctgggcctctgggtacctgaggtcttctcccgctctgtgcccttctcctcacctggctgcaatgagtgggggagcacggggcttctgcatgctgaaggcaccccactcagccaggcccttcttctcctccaggtcccccacggcccttcaggatgaaagctgcggtgctgaccttggccgtgctcttcctgacggggagccaggctcggcatttctggcagcaagatgaacccccccagagcccctgggatcgagtgaaggacctggccactgtgtacgtggatgtgctcaaagacagcggcagagactatgtgtcccagtttgaaggctccgccttgggaaaacagctaaacctaaagctccttgacaactgggacagcgtgacctccaccttcagcaagctgcgcgaacagctcggccctgtgacccaggagttctgggataacctggaaaaggagacagagggcctgaggcaggagatgagcaaggatctggaggaggtgaaggccaaggtgcagccctacctggacgacttccagaagaagtggcaggaggagatggagctccaccgccagaagctgcacgagctgcaagagaagctgagcccactgggcgaggagatgcgcgaccgcgcgcgcgcccatgtggacgcgctgcgcacgcatctggccccctacagcgacgagctgcgccagcgcttggccgcgcgccttgaggctctcaaggagaacggcggcgccagactggccgactaccacgccaaggccaccgagcatctgagcacgctcagcgagaaggccaagcccgcgctcgaggacctccgccaaggcctgctgcccgtgctggagagcttcaaggtcagcttcctgagcgctctcgaggagtacactaagaagctcaacacccagtgaggcgcccgccgccgccccccttcccggtgctcagaataaacgt

SEQ ID NO: 454 - DNA, 1291 bp, Homo sapiens
  misc_feature: Incyte ID No: 2514988CB1
  unsure 46: a, t, c, g, or other
gcagggggagaacagcccacctcgtgactgggggctgccccagccnaccctatccctgggggagggggcgggacagggggagccgtataattggacaagtctgggatccttgagtcctactcagccccagcggaggtgaaggacgtccttccccaggagccgactggccaatcacaggcaggaagatgaaggttctgtgggctgcgttgctggtcacattcctggcaggatgccaggccaaggtggagcaagcggtggagacagagccggagcccgagctgcgccagcagaccgagtggcagagcggccagcgctgggaactggcactgggtcgcttttgggattacctgcgctgggtgcagacactgtctgagcaggtgcaggaggagctgctcagctcccaggtcacccaggaactgagggcgctgatggacgagaccatgaaggagttgaaggcctacaaatcggaactggaggaacaactgaccccggtggcggaggagacgcgggcacggctgtccaaggagctgcaggcggcgcaggcccggctgggcgcggacatggaggacgtgtgcggccgcctggtgcagtaccgcggcgaggtgcaggccatgctcggccagagcaccgaggagctgcgggtgcgcctcgcctcccacctgcgcaagctgcgtaagcggctcctccgcgatgccgatgacctgcagaagcgcctggcagtgtaccaggccggggcccgcgagggcgccgagcgcggcctcagcgccatccgcgagcgcctggggcccctggtggaacagggccgcgtgcgggccgccactgtgggctccctggccggccagccgctacaggagcgggcccaggcctggggcgagcggctgcgcgcgcggatggaggagatgggcagccggacccgcgaccgcctggacgaggtgaaggagcaggtggcggaggtgcgcgccaagctggaggagcaggcccagcagatacgcctgcaggccgaggccttccaggcccgcctcaagagctggttcgagcccctggtggaagacatgcagcgccagtgggccgggctggtggagaaggtgcaggctgccgtgggcaccagcgccgcccctgtgcccagcgacaatcactgaacgccgaagcctgcagccatgcgaccccacgccaccccgtgcctcctgcctccgcgcagcctgcagcgggagaccctgtccccgccccagccgtcctcctggggtggaccctagtttaataaagattcaccaagtttcacgcaaaaaaaaaa

SEQ ID NO: 455 - DNA, 7311 bp, Homo sapiens
  misc_feature: Incyte ID No: 347926.5
  unsure 5438, 5455, 5470, 5482, 5495, 5512, 5559: a, t, c, g, or other
ctacgtggtagaaaaattgatgcttgtgggaatttattagaggactgtgggttaaatttagtactgaatgcagccttttgttgtttaaaaaatttttttgaactcacagtctacatcagcatcagcatctgcgtcaccatttcaatctgcatggtatagtgaatctgagataactcagggagcacgctcaagatcgcagaaccagcaacgggatcatgattcaaaaagacctaaactttcctgtacaaactgtactacctcagctgggagaaatgttggaaatggtttaaacacattatcagattcatcttggaggcatagtcaagttcctagatcttcatcaatggtacttggatcatttggaacagacttaatgagagagaggagagatttggagagaagaacagattcctctattagtaatcttatggattatagtcaccgaagtggtgatttcacaacttcatcatatgttcaagacagagttccttcatattcacaaggagcaagaccaaaagaaaactcaatgagcactttacagttgaatacatcatccacaaaccaccaattgccttctgaacatcagaccatactaagttctagggactccagaaattctttaagatcaaatttttcttcaagagaatcagaatcttcccgaagcaatacgcagcctggattttcttacagttcaagtagagatgaagccccaatcataagcaattcagaaagggttgtttcatctcaaagaccatttcaagaatcttctgacaatgaaggtaggcggacaacgaggagattgctgtcacgcatagcttctagcatgtcatctacttttttttcacgaagatctagtcaggattccttgaatacaagatcattgaattctgaaaattcttacgtttctccaagaatcttgacagcttcacagtcccgtagtaatgtaccatcagcttctgaagttcccgataatagggcatctgaagcttctcagggatttcgatttcttaggcgaagatggggtttgtcatctcttagccacaatcatagctctgagtcagattcagaaaattttaaccaagaatctgaaggtagaaatacaggaccatggttatcttcctcacttagaaatagatgcacacctttgttctctagaaggaggcgagagggaagagatgaatcttcaaggatacctacctctgatacatcatctagatctcatatttttagaagagaatcaaatgaagtggttcaccttgaagcacagaatgatcctcttggagctgctgccaacagaccacaagcatctgcagcatcaagcagtgccacaacaggtggctctacatcagattcggctcaaggtggaagaaatacaggaatatcagggattcttcctggttccttattccggtttgcagtccccccagcacttgggagtaatttgaccgacaatgtcatgatcacagtagatattattccttcaggttggaattcagctgatggtaaaagtgataaaactaaaagtgcgccttcaagagatccagaaagattgcagaaaataaaagagagcctccttttagaggactcagaagaagaagaaggtgacttatgtagaatttgtcaaatggcagctgcatcatcatctaatttgctgatagagccatgcaagtgcacaggaagtttgcagtatgtccaccaagactgtatgaaaaagtggttacaggccaaaattaactctggttcttcattagaagctgtaaccacctgtgaactatgtaaagagaagttggagcttaacctggaggattttgatattcatgaactacatagagctcatgcaaatgaacaagctgagtatgagtttatcagctctggtctctacctagtggtgttattgcacttgtgcgaacaaagcttttctgatatgatgggaaatacaaatgaaccaagcacacgtgtccgatttattaaccttgcaagaactcttcaggcacatatggaagatctcgaaacttcagaggatgattccgaagaagacggagaccataacaggacatttgatattgcctaacttcatataagacagatggatgatctgtgaacataagtgtttattaaaaatggcaattaaatataaattacttttgtgggggaatgcctaataaatacattgactatatataaaatgaatatatacatacacatgtatgcctgtatatatatattcattctccagtgttgctgaattaaaattctgctggactttttaacatagcaaatccgatgtttataaactggtaatcaaaaaggttttttcttttaggtgagtgggaaagtattacccttgttttaaatatctaagcaatgcctatcaacccttttttgtgttatgattactgtagtcatatttatgaaaaaaggtttgtgttttactcttgctagtgagaaaagtgggacaaaatatacttttgaaataaaatgctatatggcacctaattattttttcttttaaaatgccttaagttgcagtctcattttgataatcatttgcttccagtgtttaaaaattaaaaaaagaatggggagaaggttatgagaagagcattattaagtttccaaatttaatttgaattccaaattcacctagcaataaaatctaatttttaaaaagtatataaatataaaatgtataaatgatggatagatttttgtattgatttgcaaaatgcagattatatttgataggctatagtatgtagatattccttttaggaatattacagctgtaaattatatgagacttgccagtcaaatgctatttggtttaaaaaaattattgcaatctcaagttaatggaatatttttaaatcccacattcagagtttaaaacactggttttcaatgtgttttttagtgttgtcacttgtttatagataaatatataaataacctgtttggatcctggtcctttttaactgttccttggtaattctgagcatttatttgatgacttaatatttttcactacctttggagaacagatgaacattattcaccatgaatggatctatactgtgtggtcatgagttgtgtatacttccataacactgtatttttcttctgtcagtacccttaggatacactttaaaacaccttaaggtctgatgttatggcaacaaactactttttcaaacctaaataggaaccatgtaatttctcaaaagtgattgaacagtttgcccacacttagtttgttggtcttatgtaaaacattggctcaaaataaagtacacactgatttattttactgtttgaaatgtttccttttaaactggtgctcaaagaagacatcagacttcataaccaagaattttattacaatttcaaatctcattttaagcaataatataaatgttctaaaacatttgctcacctcttgccagttacctttgcattgtctgtcttaaagcaaaaatataaaatttaagggtggtagttttaatatattctgtgggtcctaagggatgctttgaatttgaagtatatatacttttaataaaattcagtatgacagttgtcttctgcttaacccataaaactttatttaaaaaatttaactagatggtacaaaacattcattggtatgcacataattctgtatagttttgttattaaatgctaaatgacagtgataacaatggcttaagctttacagtattcttgtagttccctagtaccacttagtatttaaatattgtcatattagcttcagattatcatgtaaatgacggtagaggaataagagaaaaggctttcattggttatcagttttaaattctgaacaaaagagaccatacactgctcactacaagaatgcaattttctaagaaaatgtagtttaaaatgttattctgaatatctgccaaagaattatattgttattagtagctagaaccaagatgttgaagaaagcagtttctacattctggatgtagtaaacaagcctgcctgtgtaatccaattatctcttcactaatgagtagataaggtgcctgttatagatgttctggtatataaagaaaaaatgtaggccaagtgtggtggctcacgcatgtaatcccagcactttgggagaccaaggtgggtggatcacttgaggtcaggagtttgagaccagcccagtcaatatggcgaaaccccgtctctaccaaaaatacaaaaagttagctgggtgtggtgacagatgtctgtggtcccagctactaaggaggctgaggcaggagaattgcgtgaaaacctgcaaggcggagattggagagagccaagatcgagccactgcactgtagcctgggcagcacagtgagactccgtcatatatatatatatatagcacttcattaccagaggcctcttggcctgttgaaaaatgaaaccaaatattgaaaattaaatcagagtttaaagcagctattttggaagagctgccattaggtagaaagtatcaaaatgtacaaaagaaagttgtatgggagttgagtggaaggtaggatttaagagcagcactgcccaataaaacttcctataatgaaaatgttctataatgtatgttgcccagtacagtagccactaaccacctgtgatttgaacacttgacaatgtggctaatgtaattcgaaaactggattttaaactaaatttacttaaatagcctcatgtggctagtggctcattggacattgtagttgtagacgtttgagactgttggttttaagttggacttaatcactttcctacccaaattctaccactcctttaagaactcctttagaactcttttagtttacataatacgccatattttttttactgtgcctgtagttcttcaaggagtggtacaatttgggtaggaaaaccaggcaggaattccagggtagtgttcaatattgacattagtaatagtctatcaataataaaatagacatctcaatcactatacaaaatctcagaaatgtaaagctcttacagagcatgcttgtgcttgtgtaacagctggtgtaatgcctgcattttcagtaccatgtagccgcactgttaatagttttctatcactttttagttactcatgtctcattaatgatagtgccattaattgtgatgagtgttttcgattcatgtggtcaataaaaagagactacacaagctggaactttgttgccattagtcaagctagtgagatagtatatctatctatctccccagaagaaagtaagataattgatggggtgtggattcagaagagggattacttttctttgagcctcagacttctagacagtatacttcagtcagtaatggaccacatatagaacagtgtttcccttagtagacccatatttttactgtaccttttctatatttagatacacaaatattgtgtnacaattgtctgcagtantcagcacagtaacangctgtgtaggtntgggacaaaatangctctaccatctgggtntgtgtaaatacaagctgattttcacacaagattccctaactatgcantcttagaacgtaccccattgataagtgatacgtgactaatttacgtgaaatttatacattctttatctttcctgtttttggtttattgatggtgaggaaaattactcgtttcagctttttcatttttttactccccaaatgattttcacctttttcttaaaatgtacaataaatgcactgaaaactttgatcactgtcactacagttgtacttaagtgtttttcttcggtttttgcttgcacagttttcatgtcattgaaggaaaaatttataaatgcttgaggagaatgagatacatcttgtataggggaaagtacaaaaggtatggtggcaagagagaaatccttaaaggggcactataatatgtaagtgttaacctaattgccagctttctctatgccatcctggacacagcgatcatattttgtttcaaataatttataaacattcattaaaacttgagtcatttgtgataaaatggtgtgtgtaaaagtaatgaaactaaaattggtgtggggtgttaaaagttgtaaaattttcttcatctaaatcataaaaagatacacattctagaggaattatctgccaaaaaaataacaattatcaaagatatttaaatgtatgggatgtacttaaaatcacttattccccatttcatgtttactaataaacatataaactaaagtgggtcaactaaatagggaagatacagcaggcaagacaaataggctgggcttttatttttatctgcttgggctttaagctttccttcattcaagtgacagattctgcctttgacgggatgcttaaaatcagtatattagatctaagatcatttctaaaacctgtttttttaatgaacctaaagacttttcacagcagatgagtacataaaaatgttactggaataaggaataccattaaagctctaatatccaatgtcaagttttatattaaaatctttcccaagttatctctgccagggcattttgttgatgtcttagtgcaagattaccaaaaacttagtcaaattgaacaggatattcattttcttctccaactaccaaaacacagtcttcattataaggtgattggggtgcggttgaaaaaactgtggtgaaacgagaatcagaatgttttttgtacaggaaccaaatgattgctcccaaaactgtcaaaattaccgtgctagcaatcaccaatgctgatattaaaatgtggttatctgataaatatttccttttgtatgggatagctgttttgcatagtgttccttccacagaagaaacttcacaatttccttttttccattcacctgtcttgatgtgcagaaaagcacaggtgtcaactaaatcctcatcatcatcttggtctgtccacttatcaaatgtcatatttgaattatcaaaccacttgaaactcgcatcatctgtgtcataaaacatgcctagtaggatatcatctgggcctttccattgctttttcaaagtatccagtataaaagcattttcttcttcattatgtatgcttatcatgtccgctccatggtcagtacactgatttctgacatcctctatgctttctactttgatggcttcttggagaaaaatgtaacaactgtcttggaactgaatccaagtagatgaaggacagtccgcgacggcagcagcggcgaggcccagcaacggcagcaggagcgcgggcagcgcggcccggagcatgacggcgggtgcgggtgggcggcagcggctg

SEQ ID NO: 456 - DNA, 998 bp, Homo sapiens
  misc_feature: Incyte ID No: 127987.21
gctgacagcattcgggccgagatgtctcgctccgtggccttagctgtgctcggcgctactctctctttctggcctggaggctatccagcgtactccaaagattcaggtttactcacgtcatccagcagagaatggaaagtcaaatttcctgaattgctatgtgtctgggtttcatccatccgacattgaagttgacttactgaagaatggagagagaattgaaaaagtggagcattcagacttgtctttcagcaaggactggtctttctatctcttgtactacactgaattcacccccactgaaaaagatgagtatgcctgccgtgtgaaccatgtgactttgtcacagcccaagatagttaagtgggatcgagacatgtaagcagcatcatggaggtttgaagatgccgcatttggattggatgaattccaaattctaagcagcgtgagatacaaaagttctgaacatatgtacttggagtaccaaaaataacagaatgcggaaaagtagtagcatttgaagagatagggccaagaattctcctaacctgatgaaagaactcaacccacagatttaggaagtttggcagcccccaaagggtaaaaacaaaaatgactccccaaaccacacttaggcatttcttagtcaaagtactaaaaataaagcctaagaaaaatactaaaaaaagtctgagaaaaagatacatactttcaaaggagaaacaatgaaacttacaactgattttcaaaggaaactatggtagctggaagacaatggagtataatttttatttatttcctccctcagccccactggtcctctccagttctgtggaatgtcatctctaaaaatgctgaaagaaaacagctgccaaactagaattctatacccaataaaaacattgtgcaaaactgaaggcataacaaagacatttttggacaaacaaaaattctgaaagaatctgtcaccccagcagacctgtgctaaaaaaataaag

SEQ ID NO: 457 - DNA, 4027 bp, Homo sapiens
  misc_feature: Incyte ID No: 2816341CB1
gcgccgggctgcgacactgcagttgtctacgcggccggggccgggacgaggaggcgttggacggggtcgcatacgttcgtcccctcgcattgcggccccgacagctgcgccaggatccccgggcggcggcgcggggcgtgaacgctctggggctcagccaggcctgcgcgggcccgatgccggaggaacccggactccggcgtagcggttttgacacaagggcgcatatcttcaaagcacctagtacctcctaccattgtcaactgatacagaattcgttgttgggaaggactggggaaacagctgtaacatttgccaccctcagaagctgctggtcctgtgtcacaccaccttagcctcttgatcgaggaagattctcgctgaagtctgttaattctactttttgagtacttatgaataaccacgtgtcttcaaaaccatctaccatgaagctaaaacataccatcaaccctattcttttatattttatacattttctaatatcactttatactattttaacatacattccgttttattttttctccgagtcaagacaagaaaaatcaaaccgaattaaagcaaagcctgtaaattcaaaacctgattctgcatacagatctgttaatagtttggatggtttggcttcagtattataccctggatgtgatactttagataaagtttttacatatgcaaaaaacaaatttaagaacaaaagactcttgggaacacgtgaagttttaaatgaggaagatgaagtacaaccaaatggaaaaatttttaaaaaggttattcttggacagtataattggctttcctatgaagatgtctttgttcgagcctttaattttggaaatggattacagatgttgggtcagaaaccaaagaccaacatcgccatcttctgtgagaccagggccgagtggatgatagctgcacaggcgtgttttatgtataattttcagcttgttacattatatgccactctaggaggtccagccattgttcatgcattaaatgaaacagaggtgaccaacatcattactagtaaagaactcttacaaacaaagttgaaggatatagtttctttggtcccacgcctgcggcacatcatcactgttgatggaaagccaccgacctggtccgagttccccaagggcatcattgtgcataccatggctgcagtggaggccctgggagccaaggccagcatggaaaaccaacctcatagcaaaccattgccctcagatattgcagtaatcatgtacacaagtggatccacaggacttccaaagggagtcatgatctcacatagtaacattattgctggtataactgggatggcagaaaggattccagaactaggagaggaagatgtctacattggatatttgcctctggcccatgttctagaattaagtgctgagcttgtctgtctttctcacggatgccgcattggttactcttcaccacagactttagcagatcagtcttcaaaaattaaaaaaggaagcaaaggggatacatccatgttgaaaccaacactgatggcagcagttccggaaatcatggatcggatctacaaaaatgtcatgaataaagtcagtgaaatgagtagttttcaacgtaatctgtttattctggcctataattacaaaatggaacagatttcaaaaggacgtaatactccactgtgcgacagctttgttttccggaaagttcgaagcttgctagggggaaatattcgtctcctgttgtgtggtggcgctccactttctgcaaccacgcagcgattcatgaacatctgtttctgctgtcctgttggtcagggatacgggctcactgaatctgctggggctggaacaatttccgaagtgtgggactacaatactggcagagtgggagcaccattagtttgctgtgaaatcaaattaaaaaactgggaggaaggtggatactttaatactgataagccacaccccaggggtgaaattcttattgggggccaaagtgtgacaatggggtactacaaaaatgaagcaaaaacaaaagctgatttctttgaagatgaaaatggacaaaggtggctctgtactggggatattggagagtttgaacccgatggatgcttaaagattattgatcgtaaaaaggaccttgtaaaactacaggcaggggaatatgtttctcttgggaaagtagaggcagctttgaagaatcttccactagtagataacatttgtgcatatgcaaacagttatcattcttatgtcattggatttgttgtgccaaatcaaaaggaactaactgaactagctcgaaagaaaggacttaaagggacttgggaggagctgtgtaacagttgtgaaatggaaaatgagctacttaaagtgctttccgaagctgctatttcagcaagtctggaaaagtttgaaattctagtaaaaattcgtttgagtcctgaaccgtggacccctgaaactggtctagtgacagatgccttcaagctgaaacgcaaagagcttaaaacacattaccaggcggacattgagcgaatgtatggaagaaaataattattctcttctggcatcagtttgctacagtgagctcagatcaaataggaaaatacttgaaatgcatgtctcaagctgcaaggcaaactccattcctcatattaaactattacttctcatgacgtcaccatttttaactgacaggattagtaaaacattaagacagcaaacttgtgtctgtctcttctttcattttccccgccaccaacttactttaccacctatgactgtacttgtcagtatgagaatttttctgaatcatattggggaagcagtgattttaaaacctcaagtttttaaacatgatttatatgttctgtataatgttcagtttgtaactttttaaaagtttggatgtatagagggataaataggaaatataagaattggttatttgggggcttttttacttactgtatttaaaaatacaagggtattgatatgaaattatgtaaatttcaaatgcttatgaatcaaatcattgttgaacaaaagatttgttgctgtgtaattattgtcttgtatgcatttgagagaaataaatatacccatacttatgttttaagaagttgagatcttgtgaatatatgcctgtcagtgtcttctttatatatttattttttattagaaaaaatgaagtttggttggtgatgcatgaaacaaaatagcaagagagggttatagtttaatagtaagggagataacacagcatgtgtagcaccagttgataattggtctctagtagcttactgtcaaaatgttcaatgaagtcttctgttcatctgttgaaactaggaaaatacccaaacttaaatggaagaattctgaaagagaggatagaatttaaagaacaagagtatataaagttattctttgaatatttcattgactatatgtacattgagttatctatatttgtaaacaaattagtcatggaaaattattctatcccaaagtctccttttagtctagataatcattatttcattttaaaattagtgtttttcatagtttgcactgatgcgtgtatggatgtgtgtgagtcagtggtagcttatttaaaaagcaccttatcctttctcccataacctttgtacactaaaaaatgaaagaatttagaatgtatttgatgatagcattctcactaagacacatgagaatttaactttataaccgcgtgagttaagatttaattcataggttttgatgtcattgttgaagttatttgtaattcagaaaccttgcttgtgtgatacatagtaagtctcttcatttattactgcttgtctgttgttatatctggattatcaaaagcaatagtgcaccaattaagatgtgctcaaatcaggacttaaatcataggcaccacatttttcatgtcagactagttactttgttgattctcagttactgtaggcatcaaaaggcaaaaatcaaaaaaaaaaaaaagg

SEQ ID NO: 458 - DNA, 1740 bp, Homo sapiens
  misc_feature: Incyte ID No: 3464877CB1
atggcggtagcgatcgctgcagcgagggtctggcggctaaaccgtggtttgagccaggctgccctcctgctgctgcggcagcctggggctcggggactggctagatctcacccccccaggcagcagcagcagttttcatctctggatgacaagccccagttcccaggggcctcggcggagtttatagataagttggaattcatccagcccaacgtcatctctggaatccccatctaccgcgtcatggaccggcaaggccagatcatcaaccccagcgaggacccccacctgccgaaggagaaggtgctgaagctctacaagagcatgacactgcttaacaccatggaccgcatcctctatgagtctcagcggcagggccggatctccttctacatgaccaactatggtgaggagggcacgcacgtggggagtgccgccgccctggacaacacggacctggtgtttggccagtaccgggaggcaggtgtgctgatgtatcgggactaccccctggaactattcatggcccagtgctatggcaacatcagtgacttgggcaaggggcgccagatgcctgtccactacggctgcaaggaacgccacttcgtcactatctcctctccactggccacgcagatccctcaggcggtgggggcggcgtacgcagccaagcgggccaatgccaacagggtcgtcatctgttacttcggcgagggggcagccagtgagggggacgcccatgccggcttcaacttcgctgccacacttgagtgccccatcatcttcttctgccggaacaatggctacgccatctccacgcccacctctgagcagtatcgcggcgatggcattgcagcacgaggccccgggtatggcatcatgtcaatccgcgtggatggtaatgatgtgtttgccgtatacaacgccacaaaggaggcccgacggcgggctgtggcagagaaccagccctttctcatcgaggccatgacctacaggatcgggcaccacagcaccagtgacgacagttcagcgtaccgctcggtggatgaggtcaattactgggataaacaggaccaccccatctcccggctgcggcactatctgctgagccaaggctggtgggatgaggagcaggagaaggcctggaggaagcagtcccgcaggaaggtgatggaggcctttgagcaggccgagcggaagcccaaacccaaccccaacctgctcttctcagacgtgtatcaggagatgcccgcccagctccgcaagcagcaggagtctctggcccgccacctgcagacctacggggagcactacccactggatcacttcgataagtgagacctgctcagcccacccccacccatcctcagctaccccgagaggtagccccactctaaggggagcagggggacctgacagcacaccactgtcttccccagtcagctccctctaaaatactcagcggccagggcggctgccactcttcacccctgctcctcccggctgttacattgtcaggggacagcatctgcagcagttgctgaggctccgtcagccccctcttcacctgttgttacagtgccttctcccaggggctgggtgagggcacattcaggactagaagcccctctgggcatggggtggacatggcaggtcagcctgtggaacttgcgcaggtgcgagtggccagcagaggtcacgaataaactgcatctctgcgcctggctctctaaaaaaaaa

SEQ ID NO: 459 - DNA, 419 bp, Homo sapiens
  misc_feature: Incyte ID No: 480500.7
  unsure 401, 407: a, t, c, g, or other
aagagatgcaaaaggcactgacttttgcctgaaccctgatatctctccacaggactaggctctaagcccctcatttcaatgaggggccatgaagacgggggcatccggctggagtgcatatctagagggtggtacccaaagcccctcacagtgtggagggacccctacggtggggttgcgcctgccctgaaagaggtctccatgcctgatgcagacggcctcttcatggtcaccacggctgtgatcatcagagacaagtctgtgaggaacatgtcctgctctatcaacaacaccctgctcggccagaagaaagaaagtgtcatttttattccagaatcctttatgcccagtgtgtctccctgtgcagtggccctgctatcattgtgggtatctgatgatanccatgncgtatgcatcta

SEQ ID NO: 460 - DNA, 1079 bp, Homo sapiens
  misc_feature: Incyte ID No: 994966.6
tggtgagaagacaatatttgctttctctttttcctttcttccggatgagaggctaagccataatagaaagaatggagaattattgattgaccgtctttattctgtgggctctgattctccaatgggaataccaagggatggttttccatactggaacccaaaggtaaagacactcaaggacagacatttttggcagagctcagttttctgtgcttggaccctctgggcccatcctggccatggtgggtgaagacgctgatctgccctgtcacctgttcccgaccatgagtgcagagaccatggagctgaagtgggtaagttccagcctaaggcaggtggtgaacgtgtatgcagatggaaaggaagtggaagacaggcagagtgcaccgtatcgagggagaacttcgattctgcgggatggcatcactgcagggaaggctgctctccgaatacacaacgtcacagcctctgacagtggaaagtacttgtgttatttccaagatggtgacttctatgaaaaagccctggtggagctgaaggttgcagcactgggttctaatcttcacgtcgaagtgaagggttatgaggatggagggatccatctggagtgcaggtccaccggctggtacccccaaccccaaatacagtggagcaacgctaagggagagaacatcccagctgtggaagcacctgtggttgcagatggagtgggcctatatgaagtagcagcatctgtgatcatgagaggcggctccggggagggtgtatcctgcatcatcagaaattccctcctcggcctggaaaagacagccagcatttccatcgcagagagcctccaggaggaactcaagaggaaaaaaatccagtacttgactcgtggagaggagtcttcgtccgataccaataagtcagcctgatgctctaatggaaaaatggccctcttcaagcctggtgaggaaatgcttcagatgaggctccaccttgttaaataaattggatgtatggaaaaatagactgcagaaaaggggaactcatttagctcacgagtggtcgagtgaagattgaaaattaacctctga

SEQ ID NO: 461 - DNA, 748 bp, Homo sapiens
  misc_feature: Incyte ID No: 338219.1
  unsure 420, 459, 541: a, t, c, g, or other
tgttagcagctcttaaaatccagaggcataagcctgtatttttgagggtttatgcatggaatccagctagaaactgagtctattacagatcccatttattatcctttctattccaagaagcctttttttctccttccccacatctgtttatggaagaaaatgaagtttggggtgtggtttgaggaatcagctagattcttatgatctgtcacatgcttggatgttggggaagcatttggagaagctcatgtgacttgtcctagattggggattttaattgagacagatgatgtttatcgggcatcccaccacctgagagttttagcaacagagtcacatgtgagtccatcagaacttacggcattgattcaagtgctgtcataaataaccaggactgctgtttttggttacttttaaagncagtttcatctggactttctgggaatatcctccttcagnaaaaccacattaggctgggaaaactattctgcctggaagtaatgacaacttgcaaccaacaagcttataaaaatacaaaganttctggagcctatggcttccattacattattcttttatagccttttatgttcattaccgcatcccagaggtgagagtcagacacaaatatgaaaataggtttcaatgttggagaggtaaatcctaacaggaaaggggtaggaaaagatataatcccccaatattaaaataaagatattgaagaagaaggatgggagagactagggct

SEQ ID NO: 462 - DNA, 1671 bp, Homo sapiens
  misc_feature: Incyte ID No: 411413CB1
tggagctgacttccgcaatcccgatggaataaatctagcacccctgatggtgtgcccacactttgctgccgaaacgaagccagacaacagatttccatcagcaggatgtgggggctcaaggttctgctgctacctgtggtgagctttgctctgtaccctgaggagatactggacacccactgggagctatggaagaagacccacaggaagcaatataacaacaaggtggatgaaatctctcggcgtttaatttgggaaaaaaacctgaagtatatttccatccataaccttgaggcttctcttggtgtccatacatatgaactggctatgaaccacctgggggacatgaccagtgaagaggtggttcagaagatgactggactcaaagtacccctgtctcattcccgcagtaatgacaccctttatatcccagaatgggaaggtagagccccagactctgtcgactatcgaaagaaaggatatgttactcctgtcaaaaatcagggtcagtgtggttcctgttgggcttttagctctgtgggtgccctggagggccaactcaagaagaaaactggcaaactcttaaatctgagtccccagaacctagtggattgtgtgtctgagaatgatggctgtggagggggctacatgaccaatgccttccaatatgtgcagaagaaccggggtattgactctgaagatgcctacccatatgtgggacaggaagagagttgtatgtacaacccaacaggcaaggcagctaaatgcagagggtacagagagatccccgaggggaatgagaaagccctgaagagggcagtggcccgagtgggacctgtctctgtggccattgatgcaagcctgacctccttccagttttacagcaaaggtgtgtattatgatgaaagctgcaatagcgataatctgaaccatgcggttttggcagtgggatatggaatccagaagggaaacaagcactggataattaaaaacagctggggagaaaactggggaaacaaaggatatatcctcatggctcgaaataagaacaacgcctgtggcattgccaacctggccagcttccccaagatgtgactccagccagccaaatccatcctgctcttccatttcttccacgatggtgcagtgtaacgatgcactttggaagggagttggtgtgctatttttgaagcagatgtggtgatactgagattgtctgttcagtttccccatttgtttgtgcttcaaatgatccttcctactttgcttctctccacccatgacctttttcactgtggccatcaggactttccctgacagctgtgtactcttaggctaagagatgtgactacagcctgcccctgactgtgttgtcccagggctgatgctgtacaggtacaggctggagattttcacataggttagattctcattcacgggactagttagctttaagcaccctagaggactagggtaatctgacttctcacttcctaagttcccttctatatcctcaaggtagaaatgtctatgttttctactccaattcataaatctattcataagtctttggtacaagtttacatgataaaaagaaatgtgatttgtcttcccttctttgcacttttgaaataaagtatttatctcctgtctacagtttaaaaaaaaaaa

SEQ ID NO: 463 - DNA, 2390 bp, Homo sapiens
  misc_feature: Incyte ID No: 1095572.13
atgattccttgcagagccgcgctgacctttgcccgatgtctgatccggagaaaaatcgtgaccctggacagtctagaagacaccaaattatgccgctgcttatccaccatggacctcattgccctgggcgttggaagcacccttggggccggggtttatgtcctcgctggggaggtggccaaggcagactcgggccccagcatcgtggtgtccttcctcattgctgccctggcttcagtgatggctggcctctgctatgccgaatttggggcccgtgttcccaagacggggtctgcatatttgtacacctacgtgactgtcggagagctgtgggccttcatcactggctggaatctcattttatcgtatgtgataggtacatcaagtgttgcaagagccgggagtggcacctttgatgaacttcttagcaaacagattggtcagtttttgagacatacttcagaatgaattacactggtcttgcagaatatcccgatttttttgctgtgtgccttatattacttctagcaggtcttttgtcttttggagtaaaagagtctgcttgggtgaataaagtcttcacagctgttaatattctcgtccttctgtttgtgatggttgctgggtttgtgaaaggaaatgtggcaaactggaagattagtgaagagtttctcaaaaatatatcagcaagtgccagagagccaccttctgaaaacggaacaagtatctatggggctggtggctttatgccttatggctttacgggaacgttggctggtgctgcaacttgcttttatgcctttgtgggatttgactgcattgcaacaactggtgaagaagttcggaatccccagaaagctattcccattggaattgtgacgtctttgcttgtttgctttatggcctattttggggtctctgcagctttaacacttatgatgccgtactacctcctcgatgaaaaaagcccccttcctgtagcgtttgaatatgtgggatggggtcctgccaaatatgtcgtcgcagctggttctctctgcgccttgtcaacaagtcttcttggatccattttcccaatgcctcgtgtaatctatgctatggcggaggatgggttgcttttcaaatgtctagctcaaatcaattccaaaacgaagacaccaataattgctactttatcatcgggtgcagtggcagctttgatggcctttctgtttgacctgaaggcgcttgtggacatgatgtccattggcacactcatggcctactctctggtggcagcctgtgttctcatcctcaggtaccagcctggcttatcttacgaccagcccaaatgttctcctgagaaagatggtctgggatcgtctcccagggtaacctcgaagagtgagtcccaggtcaccatgctgcagagacagggcttcagcatgcggaccctcttctgcccctcccttctgccaacacagcagtcagcttctctcgtgagctttctggtaggattcctagctttcctcgtgttgggcctgagtgtcttgaccacttacggagttcatgccatcaccaggctggaggcctggagcctcgctctcctcgcgctgtttcttgttctcttcgttgccatcgttctcaccatctggaggcagccccagaatcagcaaaaagtagccttcatggttccattcttaccatttttgccagcgttcagcatcttggtgaacatttacttgatggtccagttaagtgcagacacttgggtcagattcagcatttggatggcaattggcttcctgatttacttttcttatggcattagacacagcctggagggtcatctgagagatgaaaacaatgaagaagatgcttatccagacaacgttcatgcagcagcagaagaaaaatctgccattcaagcaaatgaccatcacccaagaaatctcagttcacctttcatattccatgaaaagacaagtgaattctaacacttgcaggagcagagctggtcatcgtcttagcatacatatcctacactgagtaaaccgtaacgggatgtcatcagcatgctgggttgtcatgggtttgctgcatacatagttcaccctaatttatacttactcatctggacagcatctcctcagatggtgaattatgtgcacggggaaacctcctgagtggaagtttcattcatcagtgatgaatagcccccaaacagtgggagtgtgtatgtatgtgtgtatgtatgtatctatgtatatgcttgggaacatgagtgttacaagttagctggtgttttactattattgtgttacatttttccagtgtcgtcattaatcggtggcatatactgcacatactgaaatagagcgaaatcactgaatgttaagaggttcatctat

SEQ ID NO: 464 - DNA, 1112 bp, Homo sapiens
  misc_feature: Incyte ID No: 249096.10
  unsure 1010: a, t, c, g, or other
tggctccctattcatggtattttaagagatcatttgtatattatttatcacactgttgtaatgatgttttgagatacttttataacaaaattaacatcaaaaaggtatatactttttaaaaaaaatttacttttattgatgtgtactcttcctattgatgagttaattccataaatctctacttagtttaacttattggatcaaattatcttcagcatgtatatctggggaaaaaaggtccgaattttcacatttatatttaaacttcaattttttatatttaaacttcaattttttagcaacagctgaatagctttgcggaggagtttaatagttacacattcatgctaatatacatttcctttaaacatccacaaattcttaaaaagattgaatcagtaaatttcatttcagctaaaaatggagtctaatatattgtttcaaaagatacatttttacccaccataaatgttacaatatctgaatatgctttgtcaaactatccctttatgcaatcgtcttcatattgtttttatgattctaatcaagctgtatgtagagactgaatgtgaagtcaagtctgagcacaaaaagataatgcacaatgagattgcctaccattttataggatatttactatgtatttatacgttaagacctctatgaatgaatgtatcagagaatgtctttgtaactaactgtttaattcaatctgtaataaaaatctaactaactaactcatttatttctattaaaaaggtattgtcctttaggcggggaatgggaatccttgctgcactgttgcagtcattctgaaaggacctttccctgtacttacctttcaacatgcttcaatcttatcaacgctacattttgtatttttcaaacaagtataaaattcctgcaataaagagatgtagtttttttttaagattgagtttttgtttgttatttctgaatggttcatcagtatgttaactataccttttatcgagaaggaaaatcactangttttattcaggctctaccaacccccattatatctactgtttgtttatgtcctaaattaacctttcatcctatgaagtaataaagttcattttaaaccaacg

SEQ ID NO: 465 - DNA, 4666 bp, Homo sapiens
  misc_feature: Incyte ID No: 1382987.21
  unsure 3780, 3782: a, t, c, g, or other
cctggaagcaggtggacagttcccgcagcactccacatctgtgtggtctgcctcagggtttgggtggcagcagctgagacggctggcggtagcctgggccactcttactattgagctcaagttctgttctttcagtaatttttttcaaaatgggtctaagattacaattatgtaggatagaggaatttttagagattgatgttatcttcaaaaggtcattaagttggtggtaacaacaggaactacttcaaaatacttagattaatttagaaagctattacctcaaaacgagtgttatttctattaaacacttatttagggtttattatacgcagactgctgtgttctttgtgccttgggtaacctacacatttggagtttttttgtagggcttttaaattttgacacagaattgtcaactaaagaaatgaggaacaactgggaaaaggaaatcgcagctgtgatttctcctgaactggagcatctagataaaacccttcccaccatgaataatctcatcagccaagataagcgtatcagctctaaccctgtggccaaaataatatatggtgacccagtgaccttcctgccccacctgccccggaaaagtgtggtccattgctctaagatttggagctgcaggaaaagaattacagttgagtacctccagcacattgtggaacagaaaaatggcaaagaaagagtgcccatcctctggcatttcctgcagaaggaagcagagctgaggctggtaaagttcctgcctgagattttggccttgcaaagggatctagtgaagcagttccagaacgtccagcaagttgaatacagctccatcagaggcttcctcagcaagcacagctcagatgggttgaggcagctgcttcacaacaggatcacagtctttctgtccacatggaacaaactgaggagatcgcttgagacgaacggtgagatcaacctacccaaagactactgcagcactgacttggatctggacactgagtttgagatcctcttgccacgccgacggggcctgggcctctgtgctaccgctctcgtcagctacttgattcgcctacacaatgaaattgtctacgccgtggaaaaactctccaaggaaaacaacagctattccgtggatgccgccgaggtcactgaactgcatgtcatcagttatgaagtggagcgggacctgactccactgattctctccaactgccagtaccaggtggaggagggcagagagaccgtgcaggagttcgatctggagaagattcagcggcagatcgtcagccgcttcctccagggcaagccccggctgagcctcaagggaatacccactctggtgtacagacacgactggaactatgaacatctctttatggacatcaagaacaaaatggcacaggactccctccccagctcggtcattagtgccatcagtggacagctgcagtcctacagcgatgcctgtgaagtgctgtctgtcgtagaagtcactctggggtttctgagcacagctggtggggatccaaacatgcagctgaatgtgtatactcaagacatcctgcaaatgggtgatcagacgattcacgtgttaaaggccttaaacagatgccagttaaaacacaccattgccctctggcagttcctgtctgctcataagtctgaacagctgctgcggctgcacaaagagccatttggggaaatcagttcaaggtacaaagcggatctgagcccggaaaatgctaagctcctcagcacattcctaaatcagactggcctagacgccttcctgctagagctgcacgaaatgataatcttgaaactaaagaacccccaaacccaaaccgaggagcgcttccgccctcagtggagcctgagagacactctcgtaagttacatgcaaactaaagaaagtgaaattcttcctgaaatggcatctcagttcccagaagagatactgctcgccagctgtgtctcagtgtggaaaacagctgctgtgctgaaatggaatcgagaaatgagatagaattatttcctcagctatctttggatgactttggagagaagactcctctctcctcgtctgcggcgtggacttgatcatggactggtgcctttgcattcagaaggagagctgtcagcgtagcaccgaattcaagaccaaggcgtgctacctgagctgacagctttttgaaagccgagctgtttctgaaccatgtacatacatgttctgaaactttctcatcattttatgagtactgttcattgagagatgacaatgaagattagatgaaattggaaataaaccaacattgtttacattccaggagacttgtagctcagccacacacgcagtaatgacctgtgcccgttcgcctctggcactgcccacccctcttttttttttcttctaattctgtactcacaaaagagaatctcattttcttctttcttccattcccttaaattctgagtactgtacatatatttctgggttcccacgatgatgtgaaaaactaccagactgttttttgtcttctcacaaagacaagaaaaatcagggcattttgtgagtgccttaagatcaaactaacaagatctgaccctctcccctcacagtgagccactgccccacttcagagggtaagagccaaaagcctcattgtgaaaggcactggacttggaccagggacaccatcagggccttggttttctcacgcataaaatggagagtggattaatcgccaaagattcttctgatctgacattttgaaattgtgagagaaactagatgactgtaaacttggtcacaggcctggttctggcagttctttgcggacttttttctagcattatgccaaataaacatgcagtctcagtgtgctctcgcatgtatgaatatctagtcctttctgtggttctcagccaagacataaaaactaggactcagagcacatacaaaaccagttatgtttcggaaagagggaaaagagtccccgagcccggatcttgtgctgcttttctcactgacgtgttgccttttttctttacaaaatctgctttgatacttaggacctctctggactaatttctcttcctagacagctcagcacagctattgatatgttagaggcagtatccttaatattcattctaaatgagttaacgacttaacttgaaattgggcctaaggagtgagaactacaaaaatacaaaatgcttgtccaggactcagccatgcacaccttgagcagcgccggcaggaggcacggaaggaactgtgctccgttctcctcactgtcatggtgccaccagtgtctgatgaagggcagagtgacccagactgcaggcagtaactgacttcacacagtccctggcatttagtcatctgtgattgttttatcactctggactgtgcagagccacctgccaccgagatctgcattccgactgcctatgaacgggtgtgggggccgggggctggcttgctgaagtcttcaacttgcactcggagctcctttgatacctcagagctggctgtcaggtggcagctcacacccagactcactggccacacctcagcagggggggagtcgagtgtcagtctctttctgtgaaggctttttttttcctttggcctgggaatttttcccatttttatgaaggggttttaaattgtttcattttgtgtgctgtgcttcaaagccttaactgtcaaatcttgcattatcttgtttgtacagaaatatactggcctagcagaggcaaaananaaaaaaaatgaattttattttacttgtcacacctgtcttaataaactggagttttgctgctaaagaactcttctctctggggggcagagcttctatttatggcacatagacatcagctaggcttttgggaatcgtttgtgttctttgtggaaatgtcctttagaagcacccatgaagtagtgtgttcagactgtgcacacagaaaacaggctctgccttcacatgtgagacggtggacttttcctctggacaaaatgacagcatcctggcgactccacagtggagctgagcgccactccctgtagccgatctgggactgaaacgcttacacctctgcctcagaaggagtcccccatgccctgcctgaaatgacttcactggacacagcggggctgcagctaacggggtacaggtaggagctaactaacttcacccctgagtccacttgcggggtaagagataaacagtaacccttccaggagcccactgacgttggagtgctaaaaatgccccttcagggggaaaactgcattttctcttccaaaaaggaaaggttcttccaggcgagaaacctgtggtctagaaccacagcaagaagaggaggcatgctggcctgcaccggaagactcactttgtctgccctgcgccagcctcacctcaccctgcagttcccgtttccgccatggatgcctcatcaccaaccctgaccttccccctcccaaccctttattcatcctcactcccactcatacccgcctccctggacagttccctgctgcagagttctttctgctttcagccctaccttggtggtgatttacctgaaaatcttcacaactgatcattatctccttctctttgagacctgactgaaaaaattaggt

SEQ ID NO: 466 - DNA, 665 bp, Homo sapiens
  misc_feature: Incyte ID No: 234630.47
gttgttatgagtctggttgttaagtgctggttgtttgttgttaaagtagagaaaacccctagcacagtgcttggcacacactaaagccatcataaaccatagtgatcatcaatgatggtgctcagtaaggatgatgatctgatgcctgagtcactgcaatctttctgatatggtacattttttaaattattaggtgtgggcagaagaaaaagctagtgatcaacagtggcaatggagctgtggaggacagaaagccaagtggactcaacggagaggccagcaagtctcaggaaatggtgcatttggtgaacaaggagtcgtcagaaactccagaccagtttatgacagctgatgagacaaggaacctgcagaatgtggacatgaagattggggtgtaacacctacaccattatcttggaaagaaacaaccgttggaaacataaccattacagggagctgggacacttaacagatgcaatgtgctactgattgtttcattgcgaatctttttagcataaaattttctactctttttgttttttgtgttttgttctttaaagtcaggtccaatttgtaaaaacagcattgctttctgaaattagggcccaattaataatcagcaagaatttgatcgttccagttcccacttggaggcctttcatccc

SEQ ID NO: 467 - DNA, 1417 bp, Homo sapiens
  misc_feature: Incyte ID No: 1307098.1
agatggcgtccctggatcgggtgaaggtactggtgttgggagactcaggtgttgggaaatcttcgttagtccatctcctatgccaaaatcaagtgctgggaaatccatcatggactgtgggctgctcagtggatgtcagagttcatgattacaaagaaggaaccccagaagagaagacctactacatagaattatgggatgttggaggctctgtgggcagtgccagcagcgtgaaaagcacaagagcagtattctacaactccgtaaatggtattattttcgtacacgacttaacaaataagaagtcctcccaaaacttgcgtcgttggtcattggaagctctcaacagggatttggtgccaactggagtcttggtgacaaatggggattatgatcaagaacagtttgctgataaccaaataccactgttggtaatagggactaaactggaccagattcatgaaacaaagcgccatgaagttttaactaggactgctttcctggctgaggatttcaatccagaagaaattaatttggactgcacaaatccacggtacttagctgcaggttcttccaatgctgtcaagctcagtaggttttttgataaggtcatagagaagagatactttttaagagaaggtaatcagattccaggctttcctgatcggaaaagatttggggcaggaacattaaagagccttcattatgactgaattacactcatcctttggaagagtgagcaagcagtggcagtttttcacagctcatcttgctgtgttcaattattaccatcacagccttttaacaaaatcatcttaaaatgctacccttcagccttaccctttaatggaaaaatgaaaggaagtgacaatacgggaggtccaaactttgtccctgttctctgtgttccttacctttctgtccctgtgtatagattatgtaaaagccttgtgtaaatatgagatgttgtcaaaatgatgcagtaaatgagcaatgacagtgtactgcagagaaaatttactcttgcctagaactggagggtttttatgggtctgtaattttcccacactcattgctgaaagcttaattaagtacttcaaaaacgtatctccattgttttaccttcttgaggggaacggtcttgttaaccagccctgagttgtctaccccatacaatctctgtcattttcaaagatgcaaaatggtgttattgaattgtctccaccattgtcacacacaggaatgcctaataatagcaacccttgtctccctcttctctcctttgcaaatggctcagtgactggaagaggcggactaatagccagagttaaatataaatacaaattaataatacatagagaatcctgtacagtaagaaatatggtgtggacctcatcagatacactcatgcagcaaa

SEQ ID NO: 468 - DNA, 2031 bp, Homo sapiens
  misc_feature: Incyte ID No: 1383454.2
tccttctggatgttgtagtcagaaagagtacggccatcttccagctgcttgcctgcaaagatgagcctctgctggtcggggggaatgccttccttatcctggatcttggccttcacattttcgatggtgtcactgggctccacgtcggcaccagctgcggggcaagatggaggcgctgattttggaaccttccctgtatactgtcaaagccatcctgattctggacaatgatggagatcgactttttgccaagtactatgacgacacctaccccagtgtcaaggagcaaaaggcctttgagaagaacattttcaacaagacccatcggactgacagtgaaattgccctcttggaaggcctgacagtggtatacaaaagcagtatagatctctatttctatgtgattggcagctcctatgaaaatgagctgatgcttatggctgttctgaactgtctcttcgactcattgagccagatgctgaggaaaaatgtagaaaagcgagcactgctggagaacatggaggggctgttcttggctgtggatgaaattgtagatggaggggtgatcctagagagtgatccccagcaggtggtacaccgggtggcattaaggggtgaagatgtcccccttacggagcagaccgtgtctcaggtgctgcagtcagccaaagaacagatcaagtggtcactccttcggtgaagacctcactgttcctggctcttcatcctcttcaaaaaatttgcatgtctgctgtgaattttcatctagttccccaatcgatgctctcagggtcatctcggggatcacagggatccttaaatctccattctgtttgtggttgccccctcaacctcccctacacccttcctattctttttcattcttcttgcagttctgggagtaaagctcccagcatatttagataatagggcaggggaagcaccctctttctttctagactggattatgctcacatgctcccttgccctgacatttttgtaaattctgtgccctttgctgtagctacacttcagattaaagtaggagaaagaatgtgctgagtgttttcctccctttgcctctacctggccctcatcccaacagcccagcaaggggagagagaaagagaattcttttctatagaacgagtgggggcggggatgggtagggatttatccaatctaagccctaaccccacttagtgacctcagtgttttcttccattccttcttactgccctgtcctctgccttggaagaggctttgggaatagttcatagggaagggacaacatggaagaaacagcgatttaaattgtattgaacagggcatataaaatgcattctgtaccctgatctggcatatagcttcaaaactgcagtggcgagtgtccatctcttagttagctaccttaactgtccacccttactacctgtgggatcgttgcctggtttgtcttctctgtgtcctggagcaaagccagttcctaaaactaaaactccattctagtcttgggaagaaaagtttctactcagaactggggaaggagtggaacttatgacttgggcctctaggctgtctctgtcccctcagctccccgacatgcatttactctctgccgtgggtctgcagtcgctgcaacctaccctctctctgcctcagccttacacccaagcagtaggtctgtgctctccctgtctctaggtcgctgagagaggtgcttttcttcataaaacctttggggtttggatttccccaggaagatggagaatggaatactcactcttgggtctaatctttccccttgacccagaacttcctccccacaaaaatgcctttaaaaaccttcctgagacttaagcattctgccccacttactaactgccagttctccagcactgaggtggggcagataacggggcatatttaagggggcatctttgtgtaaaagatgcatggagtcaggagaaaaccaccttcataaactgctctgtgcaaagaggaataaaacattttttccaaactgcaaaa

SEQ ID NO: 469 - DNA, 868 bp, Homo sapiens
  misc_feature: Incyte ID No: 475203.6
  unsure 44: a, t, c, g, or other
attacgtttagaaaataacactttggtatccttcccacaaaatnattctccatttgtacatatctagttgtaaaacaagttttagcttttttttttaattcctcttaacagatttttctaatatccaaggatcattctttgtcgctgaagtcagtctttcttcagcttctctttcataatggaaatgaacttattatcttgagagcaaataacttggaaaatttaaatgagataatgcagttgcaactgtgtgtccacaagtatggacatcaaatctgtgggaaaagaacaggtttgtattttcaggaaggagagaataacagtcttatagacagagggcacagctaagcacagctgccactgcaggagacaggccccatgtcaggatgccatagtgctgtggggagcacagtattacccagtgggtagggcttctgtcttccctgggagcagggatggtatcttagtcaatttttttcccttgggatgaggtctgtgcctgatgtacaacggatactccataaatgtttgacaaaccaacgaagaatgaaaaaaagcctagtcagactcccatccaaagtaggaactatctctttaacattcttgactcactatcactttacctcaaattgaacagattccatgacggaacttcattcttcacaaactagccagtgacatgtgggacagctctggccagggctctgggactgcagtgtacttgcgctctgcacggtccaggagctgtgatgtggctgtggtctaggggaatcctgcctgccccatggagttgcgcagcacaaccctggcttcaattgccagaaggctctttttaatgctgaaccaaaatgtgccttttttttttttt

SEQ ID NO: 470 - DNA, 5090 bp, Homo sapiens
  misc_feature: Incyte ID No: 1351536CB1
ctctgtccctctgtccctctgaccctgcactgtcccagcaccatgggacccacctcaggtcccagcctgctgctcctgctactaacccacctccccctggctctggggagtcccatgtactctatcatcacccccaacatcttgcggctggagagcgaggagaccatggtgctggaggcccacgacgcgcaaggggatgttccagtcactgttactgtccacgacttcccaggcaaaaaactagtgctgtccagtgagaagactgtgctgacccctgccaccaaccacatgggcaacgtcaccttcacgatcccagccaacagggagttcaagtcagaaaaggggcgcaacaagttcgtgaccgtgcaggccaccttcgggacccaagtggtggagaaggtggtgctggtcagcctgcagagcgggtacctcttcatccagacagacaagaccatctacacccctggctccacagttctctatcggatcttcaccgtcaaccacaagctgctacccgtgggccggacggtcatggtcaacattgagaacccggaaggcatcccggtcaagcaggactccttgtcttctcagaaccagcttggcgtcttgcccttgtcttgggacattccggaactcgtcaacatgggccagtggaagatccgagcctactatgaaaactcaccacagcaggtcttctccactgagtttgaggtgaaggagtacgtgctgcccagtttcgaggtcatagtggagcctacagagaaattctactacatctataacgagaagggcctggaggtcaccatcaccgccaggttcctctacgggaagaaagtggagggaactgcctttgtcatcttcgggatccaggatggcgaacagaggatttccctgcctgaatccctcaagcgcattccgattgaggatggctcgggggaggttgtgctgagccggaaggtactgctggacggggtgcagaacccccgagcagaagacctggtggggaagtctttgtacgtgtctgccaccgtcatcttgcactcaggcagtgacatggtgcaggcagagcgcagcgggatccccatcgtgacctctccctaccagatccacttcaccaagacacccaagtacttcaaaccaggaatgccctttgacctcatggtgttcgtgacgaaccctgatggctctccagcctaccgagtccccgtggcagtccagggcgaggacactgtgcagtctctaacccagggagatggcgtggccaaactcagcatcaacacacaccccagccagaagcccttgagcatcacggtgcgcacgaagaagcaggagctctcggaggcagagcaggctaccaggaccatgcaggctctgccctacagcaccgtgggcaactccaacaattacctgcatctctcagtgctacgtacagagctcagacccggggagaccctcaacgtcaacttcctcctgcgaatggaccgcgcccacgaggccaagatccgctactacacctacctgatcatgaacaagggcaggctgttgaaggcgggacgccaggtgcgagagcccggccaggacctggtggtgctgcccctgtccatcaccaccgacttcatcccttccttccgcctggtggcgtactacacgctgatcggtgccagcggccagagggaggtggtggccgactccgtgtgggtggacgtcaaggactcctgcgtgggctcgctggtggtaaaaagcggccagtcagaagaccggcagcctgtacctgggcagcagatgaccctgaagatagagggtgaccacggggcccgggtggtactggtggccgtggacaagggcgtgttcgtgctgaataagaagaacaaactgacgcagagtaagatctgggacgtggtggagaaggcagacatcggctgcaccccgggcagtgggaaggattacgccggtgtcttctccgacgcagggctgaccttcacgagcagcagtggccagcagaccgcccagagggcagaacttcagtgcccgcagccagccgcccgccgacgccgttccgtgcagctcacggagaagcgaatggacaaagtcggcaagtaccccaaggagctgcgcaagtgctgcgaggacggcatgcgggagaaccccatgaggttctcgtgccagcgccggacccgtttcatctccctgggcgaggcgtgcaagaaggtcttcctggactgctgcaactacatcacagagctgcggcggcagcacgcgcgggccagccacctgggcctggccaggagtaacctggatgaggacatcattgcagaagagaacatcgtttcccgaagtgagttcccagagagctggctgtggaacgttgaggacttgaaagagccaccgaaaaatggaatctctacgaagctcatgaatatatttttgaaagactccatcaccacgtgggagattctggctgtcagcatgtcggacaagaaagggatctgtgtggcagaccccttcgaggtcacagtaatgcaggacttcttcatcgacctgcggctaccctactctgttgttcgaaacgagcaggtggaaatccgagccgttctctacaattaccggcagaaccaagagctcaaggtgagggtggaactactccacaatccagccttctgcagcctggccaccaccaagaggcgtcaccagcagaccgtaaccatcccccccaagtcctcgttgtccgttccatatgtcatcgtgccgctaaagaccggcctgcaggaagtggaagtcaaggctgccgtctaccatcatttcatcagtgacggtgtcaggaagtccctgaaggtcgtgccggaaggaatcagaatgaacaaaactgtggctgttcgcaccctggatccagaacgcctgggccgtgaaggagtgcagaaagaggacatcccacctgcagacctcagtgaccaagtcccggacaccgagtctgagaccagaattctcctgcaagggaccccagtggcccagatgacagaggatgccgtcgacgcggaacggctgaagcacctcattgtgaccccctcgggctgcggggaacagaacatgatcggcatgacgcccacggtcatcgctgtgcattacctggatgaaacggagcagtgggagaagttcggcctagagaagcggcagggggccttggagctcatcaagaaggggtacacccagcagctggccttcagacaacccagctctgcctttgcggccttcgtgaaacgggcacccagcacctggctgaccgcctacgtggtcaaggtcttctctctggctgtcaacctcatcgccatcgactcccaagtcctctgcggggctgttaaatggctgatcctggagaagcagaagcccgacggggtcttccaggaggatgcgcccgtgatacaccaagaaatgattggtggattacggaacaacaacgagaaagacatggccctcacggcctttgttctcatctcgctgcaggaggctaaagatatttgcgaggagcaggtcaacagcctgccaggcagcatcactaaagcaggagacttccttgaagccaactacatgaacctacagagatcctacactgtggccattgctggctatgctctggcccagatgggcaggctgaaggggcctcttcttaacaaatttctgaccacagccaaagataagaaccgctgggaggaccctggtaagcagctctacaacgtggaggccacatcctatgccctcttggccctactgcagctaaaagactttgactttgtgcctcccgtcgtgcgttggctcaatgaacagagatactacggtggtggctatggctctacccaggccaccttcatggtgttccaagccttggctcaataccaaaaggacgcccctgaccaccaggaactgaaccttgatgtgtccctccaactgcccagccgcagctccaagatcacccaccgtatccactgggaatctgccagcctcctgcgatcagaagagaccaaggaaaatgagggtttcacagtcacagctgaaggaaaaggccaaggcaccttgtcggtggtgacaatgtaccatgctaaggccaaagatcaactcacctgtaataaattcgacctcaaggtcaccataaaaccagcaccggaaacagaaaagaggcctcaggatgccaagaacactatgatccttgagatctgtaccaggtaccggggagaccaggatgccactatgtctatattggacatatccatgatgactggctttgctccagacacagatgacctgaagcagctggccaatggtgttgacagatacatctccaagtatgagctggacaaagccttctccgataggaacaccctcatcatctacctggacaaggtctcacactctgaggatgactgtctagctttcaaagttcaccaatactttaatgtagagcttatccagcctggagcagtcaaggtctacgcctattacaacctggaggaaagctgtacccggttctaccatccggaaaaggaggatggaaagctgaacaagctctgccgtgatgaactgtgccgctgtgctgaggagaattgcttcatacaaaagtcggatgacaaggtcaccctggaagaacggctggacaaggcctgtgagccaggagtggactatgtgtacaagacccgactggtcaaggttcagctgtccaatgactttgacgagtacatcatggccattgagcagaccatcaagtcaggctcggatgaggtgcaggttggacagcagcgcacgttcatcagccccatcaagtgcagagaagccctgaagctggaggagaagaaacactacctcatgtggggtctctcctccgatttctggggagagaagcccaacctcagctacatcatcgggaaggacacttgggtggagcactggcctgaggaggacgaatgccaagacgaagagaaccagaaacaatgccaggacctcggcgccttcaccgagagcatggttgtctttgggtgccccaactgaccacacccccattcccccactccagataaagcttcagttatatctcaaaaaaaaaa

SEQ ID NO: 471 - DNA, 2717 bp, Homo sapiens
  misc_feature: Incyte ID No: 361759CB1
ggcttacccgggaggagctaaggccggagaggaggtactgaaggggagagtcctggacctttggcagcaaagggtgggacttctgcagtttctgtttccttgactggcagctcagcggggccctcccgcttggatgttccgggaaagtgatgtgggtaggacaggcggggcgagccgcaggtgccagaacacagattgtataaaaggctgggggctggtggggagcaggggaagggaatgtgaccaggtctaggtctggagtttcagcttggacactgagccaagcagacaagcaaagcaagccaggacacaccatcctgccccaggcccagcttctctcctgccttccaacgccatggggagcaatctcagcccccaactctgcctgatgccctttatcttgggcctcttgtctggaggtgtgaccaccactccatggtctttggcccggccccagggatcctgctctctggagggggtagagatcaaaggcggctccttccgacttctccaagagggccaggcactggagtacgtgtgtccttctggcttctacccgtaccctgtgcagacacgtacctgcagatctacggggtcctggagcaccctgaagactcaagaccaaaagactgtcaggaaggcagagtgcagagcaatccactgtccaagaccacacgacttcgagaacggggaatactggccccggtctccctactacaatgtgagtgatgagatctctttccactgctatgacggttacactctccggggctctgccaatcgcacctgccaagtgaatggccggtggagtgggcagacagcgatctgtgacaacggagcggggtactgctccaacccgggcatccccattggcacaaggaaggtgggcagccagtaccgccttgaagacagcgtcacctaccactgcagccgggggcttaccctgcgtggctcccagcggcgaacgtgtcaggaaggtggctcttggagcgggacggagccttcctgccaagactccttcatgtacgacacccctcaagaggtggccgaagctttcctgtcttccctgacagagaccatagaaggagtcgatgctgaggatgggcacggcccaggggaacaacagaagcggaagatcgtcctggacccttcaggctccatgaacatctacctggtgctagatggatcagacagcattggggccagcaacttcacaggagccaaaaagtgtctagtcaacttaattgagaaggtggcaagttatggtgtgaagccaagatatggtctagtgacatatgccacataccccaaaatttgggtcaaagtgtctgaagcagacagcagtaatgcagactgggtcacgaagcagctcaatgaaatcaattatgaagaccacaagttgaagtcagggactaacaccaagaaggccctccaggcagtgtacagcatgatgagctggccagatgacgtccctcctgaaggctggaaccgcacccgccatgtcatcatcctcatgactgatggattgcacaacatgggcggggacccaattactgtcattgatgagatccgggacttgctatacattggcaaggatcgcaaaaacccaagggaggattatctggatgtctatgtgtttggggtcgggcctttggtgaaccaagtgaacatcaatgctttggcttccaagaaagacaatgagcaacatgtgttcaaagtcaaggatatggaaaacctggaagatgttttctaccaaatgatcgatgaaagccagtctctgagtctctgtggcatggtttgggaacacaggaagggtaccgattaccacaagcaaccatggcaggccaagatctcagtcattcgcccttcaaagggacacgagagctgtatgggggctgtggtgtctgagtactttgtgctgacagcagcacattgtttcactgtggatgacaaggaacactcaatcaaggtcagcgtaggaggggagaagcgggacctggagatagaagtagtcctatttcaccccaactacaacattaatgggaaaaaagaagcaggaattcctgaattttatgactatgacgttgccctgatcaagctcaagaataagctgaaatatggccagactatcaggcccatttgtctcccctgcaccgagggaacaactcgagctttgaggcttcctccaactaccacttgccagcaacaaaaggaagagctgctccctgcacaggatatcaaagctctgtttgtgtctgaggaggagaaaaagctgactcggaaggaggtctacatcaagaatggggataagaaaggcagctgtgagagagatgctcaatatgccccaggctatgacaaagtcaaggacatctcagaggtggtcacccctcggttcctttgtactggaggagtgagtccctatgctgaccccaatacttgcagaggtgattctggcggccccttgatagttcacaagagaagtcgtttcattcaagttggtgtaatcagctggggagtagtggatgtctgcaaaaaccagaagcggcaaaagcaggtacctgctcacgcccgagactttcacatcaacctctttcaagtgctgccctggctgaaggagaaactccaagatgaggatttgggttttctataaggggtttcctgctggacaggggcgtgggattgaattaaaacagctgcgacaacaaaaaaaaaaaaaa

SEQ ID NO: 472 - DNA, 2659 bp, Homo sapiens
  misc_feature: Incyte ID No: 420115CB1
gccggaggttcctgcagagggagcgtcaaggccctgtgctgctgtccctgggggccagaggggttgcccagcatgcccactggcaggagagagggaactgacccacttgctcctaccagcttctgaaggctccaaagtccggaggtgcagaaagccaggaccaagagacaggcagctcaccagggtggacaaatcgccagagatgtggtgcattgtcctgttttcacttttggcatgggtttatgctgagcctaccatgtatggggagatcctgtcccctaactatcctcaggcatatcccagtgaggtagagaaatcttgggacatagaagttcctgaagggtatgggattcacctctacttcacccatctggacattgagctgtcagagaactgtgcgtatgactcagtgcagataatctcaggagacactgaagaagggaggctctgtggacagaggagcagtaacaatccccactctccaattgtggaagagttccaagtcccatacaacaaactccaggtgatctttaagtcagacttttccaatgaagagcattttacggggtttgctgcatactatgttgccacagacataaatgaatgcacagattttgtagatgtcccttgtagccacttctgcaacaatttcattggtggttacttctgctcctgccccccggaatatttcctccatgatgacatgaagaattgcggagttaattgcagtggggatgtattcactgcactgattggggagattgcaagtcccaattatcccaaaccatatccagagaactcaaggtgtgaataccagatccggttggagaaagggttccaagtggtggtgaccttgcggagagaagattttgatgtggaagcagctgactcagcgggaaactgccttgacagtttagtttttgttgcaggagatcggcaatttggtccttactgtggtcatggattccctgggcctctaaatattgaaaccaagagtaatgctcttgatatcatcttccaaactgatctaacagggcaaaaaaagggctggaaacttcgctatcatggagatccaatgccctgccctaaggaagacactcccaattctgtttgggagcctgcgaaggcaaaatatgtctttagagatgtggtgcagataacctgtctggatgggtttgaagttgtggagggacgtgttggtgcaacatctttctattcgacttgtcaaagcaatggaaagtggagtaattccaaactgaaatgtcaacctgtggactgtggcattcctgaatccattgagaatggtaaagttgaagacccagagagcactttgtttggttctgtcatccgctacacttgtgaggagccatattactacatggaaaatggaggaggtggggagtatcactgtgctggtaacgggagctgggtgaatgaggtgctgggcccggagctgccgaaatgtgttccagtctgtggagtccccagagaaccctttgaagaaaaacagaggataattggaggatccgatgcagatattaaaaacttcccctggcaagtcttctttgacaacccatgggctggtggagcgctcattaatgagtactgggtgctgacggctgctcatgttgtggagggaaacagggagccaacaatgtatgttgggtccacctcagtgcagacctcacggctggcaaaatccaagatgctcactcctgagcatgtgtttattcatccgggatggaagctgctggaagtcccagaaggacgaaccaattttgataatgacattgcactggtgcggctgaaagacccagtgaaaatgggacccaccgtctctcccatctgcctaccaggcacctcttccgactacaacctcatggatggggacctgggactgatctcaggctggggccgaacagagaagagagatcgtgctgttcgcctcaaggcggcaaggttacctgtagctcctttaagaaaatgcaaagaagtgaaagtggagaaacccacagcagatgcagaggcctatgttttcactcctaacatgatctgtgctggaggagagaagggcatggatagctgtaaaggggacagtggtggggcctttgctgtacaggatcccaatgacaagaccaaattctacgcagctggcctggtgtcctgggggccccagtgtgggacctatgggctctacacacgggtaaagaactatgttgactggataatgaagactatgcaggaaaatagcaccccccgtgaggactaatccagatacatcccaccagcctctccaagggtggtgaccaatgcattaccttctgttccttatgatattctcattatttcatcatgactgaaagaagacacgagcgaatgatttaaatagaacttgattgttgagacgccttgctagaggtagagtttgatcatagaattgtgctggtcatacatttgtggtctgactccttggggtcctttccccggagtacctattgtagataacactatgggtggggcactcctttcttgcactattccacagggataccttaattctttgtttcctctttacctgttcaaaattccatttacttgatcattctcagtatccactgtctatgtacaataaaggatgtttataagcaaaaaaaaaaaa

SEQ ID NO: 473 - DNA, 860 bp, Homo sapiens
  misc_feature: Incyte ID No: 1670142CB1
ctcgagctggaacacaggactgctgtctgccctctctgctcgccctgcctagcttgaggatctgtcaccccagccatgaggattatcgccctcctcgctgctattctcttggtagccctccaggtccgggcaggcccactccaggcaagaggtgatgaggctccaggccaggagcagcgtgggccagaagaccaggacatatctatttcctttgcatgggataaaagctctgctcttcaggtttcaggctcaacaaggggcatggtctgctcttgcagattagtattctgccggcgaacagaacttcgtgttgggaactgcctcattggtggtgtgagtttcacatactgctgcacgcgtgtcgattaacgttctgctgtccaagagaatgtcatgctgggaacgccatcatcggtggtgttagcttcacatgcttctgcagctgagcttgcagaatagagaaaaatgagctcataatttgctttgagagctacaggaaatggttgtttctcctatactttgtccttaacatctttcttgatcctaaatatatatctcgtaacaagatgtctttgtttacacctctttaaaatttgatatgtgtctgtgtcaagacactagaaagcaactgccagaatcctacatgaatattttggaacaaattaaagtttcaaaatctagaatttttaaggaggaccatggcttcagacacaaactgaaacgaggcacaaatgatgccactgatctcaccatccactgctcggtcttttcattcggcctattttggatggattccctctcaagacaacttccctatactaggcaaaagaatccagggcagttccagtttagctacccaa

SEQ ID NO: 474 - DNA, 771 bp, Homo sapiens
  misc_feature: Incyte ID No: 319171.5
  unsure 159, 184: a, t, c, g, or other
gagcagttattcgctttcgtgatcagtctgttctacagctggatcttcctttttaaaatggctaaaaacgctatttttggctgtatagtacccaatcatgcaggcggcagggaggggctcgctttggccctcttcagcacgtcacaccctaccttaatncgcagccaactgtgtggcgcccccnactttccctagcggcaactccctcctccctgcaatccttccttcttattccggtttccagagcacgtctccaggcttcgacgtcaccacgctgggacgtatgtgccgagggccgcggcgtctgacctcatggcgtagagcctagcaacagcgcaggctcccagccgagtccgttatggccgctgccgtcccgaagaggatgagggggccagcacaagcgaaactgctgcccgggtcggccatccaagcccttgtggggttggcgcggccgctggtcttggcgctcctgcttgtgtccgccgctctatccagtgttgtatcacggactgattcaccgagcccaaccgtactcaactcacatatttctaccccaaatgtgaatgctttaacacatgaaaaccaaaccaaaccttctatttcccaaatcagcaccaccctccctcccacgacgagtaccaagaaaagtggaggagcatctgtggtccctcatccctcgcctactcctctgtctcaagaggaagctgataacaatgaagatcctagtatagaggaggaggatcttctcatgctgaacagttctccatccac

SEQ ID NO: 475 - DNA, 3286 bp, Homo sapiens
  misc_feature: Incyte ID No: 1815320CB1
ctgagctctgccgcctggctctagccgcctgcctggcccccgccgggactcttgcccaccctcagccatggctccgatatctctgtcgtggctgctccgcttggccaccttctgccatctgactgtcctgctggctggacagcaccacggtgtgacgaaatgcaacatcacgtgcagcaagatgacatcaaagatacctgtagctttgctcatccactatcaacagaaccaggcatcatgcggcaaacgcgcaatcatcttggagacgagacagcacaggctgttctgtgccgacccgaaggagcaatgggtcaaggacgcgatgcagcatctggaccgccaggctgctgccctaactcgaaatggcggcaccttcgagaagcagatcggcgaggtgaagcccaggaccacccctgccgccgggggaatggacgagtctgtggtcctggagcccgaagccacaggcgaaagcagtagcctggagccgactccttcttcccaggaagcacagagggccctggggacctccccagagctgccgacgggcgtgactggttcctcagggaccaggctccccccgacgccaaaggctcaggatggagggcctgtgggcacggagcttttccgagtgcctcccgtctccactgccgccacgtggcagagttctgctccccaccaacctgggcccagcctctgggctgaggcaaagacctctgaggccccgtccacccaggacccctccacccaggcctccactgcgtcctccccagccccagaggagaatgctccgtctgaaggccagcgtgtgtggggtcagggacagagccccaggccagagaactctctggagcgggaggagatgggtcccgtgccagcgcacacggatgccttccaggactgggggcctggcagcatggcccacgtctctgtggtccctgtctcctcagaagggacccccagcagggagccagtggcttcaggcagctggacccctaaggctgaggaacccatccatgccaccatggacccccagaggctgggcgtccttatcactcctgtccctgacgcccaggctgccacccggaggcaggcggtggggctgctggccttccttggcctcctcttctgcctgggggtggccatgttcacctaccagagcctccagggctgccctcgaaagatggcaggagagatggcggagggccttcgctacatcccccggagctgtggtagtaattcatatgtcctggtgcccgtgtgaactcctctggcctgtgtctagttgtttgattcagacagctgcctgggatccctcatcctcatacccacccccacccaagggcctggcctgagctgggatgattggaggggggaggtgggatcctccaggtgcacaagctccaagctcccaggcattccccaggaggccagccttgaccattctccaccttccagggacagagggggtggcctcccaactcaccccagccccaaaactctcctctgctgctggctggttagaggttccctttgacgccatcccagccccaatgaacaattatttattaaatgcccagccccttctgacccatgctgccctgtgagtactacagtcctcccatctcacacatgagcatcaggccaggccctctgcccactccctgcaacctgattgtgtctcttggtcctgctgcagttgccagtcaccccggccacctgcggtgctatctcccccagccccatcctctgtacagagcccacgcccccactggtgacatgtcttttcttgcatgaggctagtgtggtgtttcctggcactgcttccagtgaggctctgcccttggttaggcattgtgggaaggggagataagggtatctggtgactttcctctttggtctacactgtgctgagtctgaaggctgggttctgatcctagttccaccatcaagccaccaacatactcccatctgtgaaaggaaagagggaggtaaggaatacctgtccccctgacaacactcattgacctgaggcccttctctccagcccctggatgcagcctcacagtccttaccagcagagcaccttagacagtccctgccaatggactaacttgtctttggaccctgaggcccagagggcctgcaagggagtgagttgatagcacagaccctgccctgtgggcccccaaatggaaatgggcagagcagagaccatccctgaaggccccgcccaggcttagtcactgagacagcccgggctctgcctcccatcacccgctaagagggagggagggctccagacacatgtccaagaagcccaggaaaggctccaggagcagccacattcctgatgcttcttcagagactcctgcaggcagccaggccacaagacccttgtggtcccaccccacacacgccagattctttcctgaggctgggctcccttcccacctctctcactccttgaaaacactgttctctgccctccaagaccttctccttcacctttgtccccaccgcagacaggaccagggatttccatgatgttttccatgagtcccctgtttgtttctgaaagggacgctacccgggaagggggctgggacatgggaaaggggaagttgtaggcataaagtcaggggttcccttttttggctgctgaaggctcgagcatgcctggatggggctgcaccggctggcctggcccctcagggtccctggtggcagctcacctctcccttggattgtccccgacccttgccgtctacctgaggggcctcttatgggctgggttctacccaggtgctaggaacactccttcacagatgggtgcttggaggaaggaaacccagctctggtccatagagagcaagacgctgtgctgccctgcccacctggcctctgcactcccctgctgggtgtggcgcagcatattcaggaagctcagggcctggctcaggtggggtcactctggcagctcagagagggtgggagtgggtccaatgcactttgttctggctcttccaggctgggagagcctttcaggggtgggacaccctgtgatggggccctgcctcctttgtgaggaagccgctggggccagttggtcccccttccatggactttgttagtttctccaagcaggacatggacaaggatgatctaggaagactttggaaagagtaggaagactttggaaagacttttccaaccctcatcaccaacgtctgtgccattttgtattttactaataaaatttaaaagtcttgtgaaaaaaaaaaaaaaa

SEQ ID NO: 476 - DNA, 3496 bp, Homo sapiens
  misc_feature: Incyte ID No: 241269.6
  unsure 3480, 3493: a, t, c, g, or other
cctcccaaggaggagaggtgggaacgcctggcctgggtcagatgggagaggctctggccggcagacagcagggcaaggtccctacaaccttcagaagtgtgtttagggggaacagtctgacagcctcctgagggcaggggccccagaatccgaccttgggtgtttgacatacgcgtgtggtatttggcgtgagtccttgccccatttacctgcctcaggagctgctgtgagtagtgggcccaatccatggatgtgaatagaaggttcttagagccagcagttcccaggcccgggccacttcaccacctcaccttctgccatctgactgtcctgctggctggacagcaccacggtgtgacgaaatgcaacatcacgtgcagcaagatgacatcaaagatacctgtagctttgctcatccactatcaacagaaccaggcatcatgcggcaaacgcgcaatcatcttggagacgagacagcacaggctgttctgtgccgacccgaaggagcaatgggtcaaggacgcgatgcagcatctggaccgccaggctgctgccctaactcgaaatggcggcaccttcgagaagcagatcggcgaggtgaagcccaggaccacccctgccgccgggggaatggacgagtctgtggtcctggagcccgaagccacaggcgaaagcagtagcctggagccgactccttcttcccaggaagcacagagggccctggggacctccccagagctgccgacgggcgtgactggttcctcagggaccaggctccccccgacgccaaaggctcaggatggagggcctgtgggcacggagcttttccgagtgcctcccgtctccactgccgccacgtggcagagttctgctccccaccaacctgggcccagcctctgggctgaggcaaagacctctgaggccccgtccacccaggacccctccacccaggcctccactgcgtcctccccagccccagaggagaatgctccgtctgaaggccagcgtgtgtggggtcagggacagagccccaggccagagaactctctggagcgggaggagatgggtcccgtgccagcgcacacggatgccttccaggactgggggcctggcagcatggcccacgtctctgtggtccctgtctcctcagaagggacccccagcagggagccagtggcttcaggcagctggacccctaaggctgaggaacccatccatgccaccatggacccccagaggctgggcgtccttatcactcctgtccctgacgcccaggctgccacccggaggcaggcggtggggctgctggccttccttggcctcctcttctgcctgggggtggccatgttcacctaccagagcctccagggctgccctcgaaagatggcaggagagatggcggagggccttcgctacatcccccggagctgtggtagtaattcatatgtcctggtgcccgtgtgaactcctctggcctgtgtctagttgtttgattcagacagctgcctgggatccctcatcctcatacccacccccacccaagggcctggcctgagctgggatgattggaggggggaggtgggatcctccaggtgcacaagctccaagctcccaggcattccccaggaggccagccttgaccattctccaccttccagggacagagggggtggcctcccaactcaccccagccccaaaactctcctctgctgctggctggttagaggttccctttgacgccatcccagccccaatgaacaattatttattaaatgcccagccccttctgacccatgctgccctgtgagtactacagtcctcccatctcacacatgagcatcaggccaggccctctgcccactccctgcaacctgattgtgtctcttggtcctgctgcagttgccagtcaccccggccacctgcggtgctatctcccccagccccatcctctgtacagagcccacgcccccactggtgacatgtcttttcttgcatgaggctagtgtggtgtttcctggcactgcttccagtgaggctctgcccttggttaggcattgtgggaaggggagataagggtatctggtgactttcctctttggtctacactgtgctgagtctgaaggctgggttctgatcctagttccaccatcaagccaccaacatactcccatctgtgaaaggaaagagggaggtaaggaatacctgtccccctgacaacactcattgacctgaggcccttctctccagcccctggatgcagcctcacagtccttaccagcagagcaccttagacagtccctgccaatggactaacttgtctttggaccctgaggcccagagggcctgcaagggagtgagttgatagcacagaccctgccctgtgggcccccaaatggaaatgggcagagcagagaccatccctgaaggccccgcccaggcttagtcactgagacagcccgggctctgcctcccatcacccgctaagagggagggagggctccagacacatgtccaagaagcccaggaaaggctccaggagcagccacattcctgatgcttcttcagagactcctgcaggcagccaggccacaagacccttgtggtcccaccccacacacgccagattctttcctgaggctgggctcccttcccacctctctcactccttgaaaacactgttctctgccctccaagaccttctccttcacctttgtccccaccgcagacaggaccagggatttccatgatgttttccatgagtcccctgtttgtttctgaaagggacgctacccgggaagggggctgggacatgggaaaggggaagttgtaggcataaagtcaggggttcccttttttggctgctgaaggctcgagcatgcctggatggggctgcaccggctggcctggcccctcagggtccctggtggcagctcacctctcccttggattgtccccgacccttgccgtctacctgaggggcctcttatgggctgggttctacccaggtgctaggaacactccttcacagatgggtgcttggaggaaggaaacccagctctggtccatagagagcaagacgctgtgctgccctgcccacctggcctctgcactcccctgctgggtgtggcgcagcatattcaggaagctcagggcctggctcaggtggggtcactctggcagctcagagagggtgggagtgggtccaatgcactttgttctggctcttccaggctgggagagcctttcaggggtgggacaccctgtgatggggccctgcctcctttgtgaggaagccgctggggccagttggtcccccttccatggactttgttagtttctccaagcaggacatggacaaggatgatctaggaagactttggaaagagtaggaagactttggaaagacttttccaaccctcatcaccaacgtctgtgccattttgtattttactaataaaatttaaaagtcttgtgaaaaanaaaaaaaaaaggncgg

SEQ ID NO: 477 - DNA, 2563 bp, Homo sapiens
  misc_feature: Incyte ID No: 1217831CB1
  unsure 2551: a, t, c, g, or other
ggagcacgtccaggaactcctcagcagcgcctccttcagctccacagccagacgccctcagacagcaaagcctacccccgcgccgcgccctgcccgccgctgcgatgctcgcccgcgccctgctgctgtgcgcggtcctggcgctcagccatacagcaaatccttgctgttcccacccatgtcaaaaccgaggtgtatgtatgagtgtgggatttgaccagtataagtgcgattgtacccggacaggattctatggagaaaactgctcaacaccggaatttttgacaagaatagaattatttctgaaacccactccaaacacagtgcactacatacttacccacttcaagggattttggaacgttgtgaataacattcccttccttcgaaatgcaattatgagttatgtcttgacatccagatcacatttgattgacagtccaccaacttacaatgctgactatggctacaaaagctgggaagccttctctaacctctcctattatactagagcccttcctcctgtgcctgatgattgcccgactcccttgggtgtcaaaggtaaaaagcagcttcctgattcaaatgagattgtggaaaaattgcttctaagaagaaagttcatccctgatccccagggctcaaacatgatgtttgcattctttgcccagcacttcacgcatcagtttttccagacagatcttaagcgagggccagctttcaccaacgggctgggccatggggtggacttaaatcatatttacggtgaaactctggctagacagcgtaaactgcgccttttcaaggatggaaaaatgaaatatcagataattgatggagagatgtatcctcccacagtcaaagatactcaggcagagatgatctaccctcctcaagtccctgagcatctacggtttgctgtggggcaggaggtctttggtctggtgcctggtctgatgatgtatgccacaatctggctgcgggaacacaacagagtatgcgatgtgcttaaacaggagcatcctgaatggggtgatgagcagttgttccagacaagcaggctaatactgataggagagactattaagattgtgattgaagattatgtgcaacacttgagtggctatcacttcaaactgaaatttgacccagaactacttttcaacaaacaattccagtaccaaaatcgtattgctgctgaatttaacaccctctatcactggcatccccttctgcctgacacctttcaaattcatgaccagaaatacaactatcaacagtttatctacaacaactctatattgctggaacatggaattacccagtttgttgaatcattcaccaggcaaattgctggcagggttgctggtggtaggaatgttccacccgcagtacagaaagtatcacaggcttccattgaccagagcaggcagatgaaataccagtcttttaatgagtaccgcaaacgctttatgctgaagccctatgaatcatttgaagaacttacaggagaaaaggaaatgtctgcagagttggaagcactctatggtgacatcgatgctgtggagctgtatcctgcccttctggtagaaaagcctcggccagatgccatctttggtgaaaccatggtagaagttggagcaccattctccttgaaaggacttatgggtaatgttatatgttctcctgcctactggaagccaagcacttttggtggagaagtgggttttcaaatcatcaacactgcctcaattcagtctctcatctgcaataacgtgaagggctgtccctttacttcattcagtgttccagatccagagctcattaaaacagtcaccatcaatgcaagttcttcccgctccggactagatgatatcaatcccacagtactactaaaagaacgttcgactgaactgtagaagtctaatgatcatatttatttatttatatgaaccatgtctattaatttaattatttaataatatttatattaaactccttatgttacttaacatcttctgtaacagaagtcagtactcctgttgcggagaaaggagtcatacttgtgaagacttttatgtcactactctaaagattttgctgttgctgttaagtttggaaaacagtttttattctgttttataaaccagagagaaatgagttttgacgtctttttacttgaatttcaacttatattataagaacgaaagtaaagatgtttgaatacttaaacactgtcacaagatggcaaaatgctgaaagtttttacactgtcgatgtttccaatgcatcttccatgatgcattagaagtaactaatgtttgaaattttaaagtacttttggttatttttctgtcatcaaacaaaaacaggtatcagtgcattattaaatgaatatttaaattagacattaccagtaatttcatgtctactttttaaaatcagcaatgaaacaataatttgaaatttctaaattcatagggtagaatcacctgtaaaagcttgtttgatttcttaaagttattaaacttgtacatataccaaaaagaanaaaaaaaaaaaa

SEQ ID NO: 478 - DNA, 4496 bp, Homo sapiens
  misc_feature: Incyte ID No: 271804.3
ggagcacgtccaggaactcctcagcagcgcctccttcagctccacagccagacgccctcagacagcaaagcctacccccgcgccgcgccctgcccgccgctgcgatgctcgcccgcgccctgctgctgtgcgcggtcctggcgctcagccatacagcaaatccttgctgttcccacccatgtcaaaaccgaggtgtatgtatgagtgtgggatttgaccagtataagtgcgattgtacccggacaggattctatggagaaaactgctcaacaccggaatttttgacaagaataaaattatttctgaaacccactccaaacacagtgcactacatacttacccacttcaagggattttggaacgttgtgaataacattcccttccttcgaaatgcaattatgagttatgtgttgacatccagatcacatttgattgacagtccaccaacttacaatgctgactatggctacaaaagctgggaagccttctctaacctctcctattatactagagcccttcctcctgtgcctgatgattgcccgactcccttgggtgtcaaaggtaaaaagcagcttcctgattcaaatgagattgtggaaaaattgcttctaagaagaaagttcatccctgatccccagggctcaaacatgatgtttgcattctttgcccagcacttcacgcatcagtttttcaagacagatcataagcgagggccagctttcaccaacgggctgggccatggggtggacttaaatcatatttacggtgaaactctggctagacagcgtaaactgcgccttttcaaggatggaaaaatgaaatatcagataattgatggagagatgtatcctcccacagtcaaagatactcaggcagagatgatctaccctcctcaagtccctgagcatctacggtttgctgtggggcaggaggtctttggtctggtgcctggtctgatgatgtatgccacaatctggctgcgggaacacaacagagtatgcgatgtgcttaaacaggagcatcctgaatggggtgatgagcagttgttccagacaagcaggctaatactgataggagagactattaagattgtgattgaagattatgtgcaacacttgagtggctatcacttcaaactgaaatttgacccagaactacttttcaacaaacaattccagtaccaaaatcgtattgctgctgaatttaacaccctctatcactggcatccccttctgcctgacacctttcaaattcatgaccagaaatacaactatcaacagtttatctacaacaactctatattgctggaacatggaattacccagtttgttgaatcattcaccaggcaaattgctggcagggttgctggtggtaggaatgttccacccgcagtacagaaagtatcacaggcttccattgaccagagcaggcagatgaaataccagtcttttaatgagtaccgcaaacgctttatgctgaagccctatgaatcatttgaagaacttacaggagaaaaggaaatgtctgcagagttggaagcactctatggtgacatcgatgctgtggagctgtatcctgcccttctggtagaaaagcctcggccagatgccatctttggtgaaaccatggtagaagttggagcaccattctccttgaaaggacttatgggtaatgttatatgttctcctgcctactggaagccaagcacttttggtggagaagtgggttttcaaatcatcaacactgcctcaattcagtctctcatctgcaataacgtgaagggctgtccctttacttcattcagtgttccagatccagagctcattaaaacagtcaccatcaatgcaagttcttcccgctccggactagatgatatcaatcccacagtactactaaaagaacgttcgactgaactgtagaagtctaatgatcatatttatttatttatatgaaccatgtctattaatttaattatttaataatatttatattaaactccttatgttacttaacatcttctgtaacagaagtcagtactcctgttgcggagaaaggagtcatacttgtgaagacttttatgtcactactctaaagattttgctgttgctgttaagtttggaaaacagtttttattctgttttataaaccagagagaaatgagttttgacgtctttttacttgaatttcaacttatattataagaacgaaagtaaagatgtttgaatacttaaacactgtcacaagatggcaaaatgctgaaagtttttacactgtcgatgtttccaatgcatcttccatgatgcattagaagtaactaatgtttgaaattttaaagtacttttggttatttttctgtcatcaaacaaaaacaggtatcagtgcattattaaatgaatatttaaattagacattaccagtaatttcatgtctactttttaaaatcagcaatgaaacaataatttgaaatttctaaattcatagggtagaatcacctgtaaaagcttgtttgatttcttaaagttattaaacttgtacatataccaaaaagaagctgtcttggatttaaatctgtaaaatcagtagaaattttactacaattgcttgttaaaatattttataagtgatgttcctttttcaccaagagtataaacctttttagtgtgactgttaaaacttccttttaaatcaaaatgccaaatttattaaggtggtggagccactgcagtgttatcttaaaataagaatattttgttgagatattccagaatttgtttatatggctggtaacatgtaaaatctatatcagcaaaagggtctacctttaaaataagcaataacaaagaagaaaaccaaattattgttcaaatttaggtttaaacttttgaagcaaacttttttttatccttgtgcactgcaggcctggtactcagattttgctatgaggttaatgaagtaccaagctgtgcttgaataacgatatgttttctcagattttctgttgtacagtttaatttagcagtccatatcacattgcaaaagtagcaatgacctcataaaatacctcttcaaaatgcttaaattcatttcacacattaattttatctcagtcttgaagccaattcagtaggtgcattggaatcaagcctggctacctgcatgctgttccttttcttttcttcttttagccattttgctaagagacacagtcttctcatcacttcgtttctcctattttgttttactagttttaagatcagagttcactttctttggactctgcctatattttcttacctgaacttttgcaagttttcaggtaaacctcagctcaggactgctatttagctcctcttaagaagattaaaagagaaaaaaaaaggcccttttaaaaatagtatacacttattttaagtgaaaagcagagaattttatttatagctaattttagctatctgtaaccaagatggatgcaaagaggctagtgcctcagagagaactgtacggggtttgtgactggaaaaagttacgttcccattctaattaatgccctttcttatttaaaaacaaaaccaaatgatatctaagtagttctcagcaataataataatgacgataatacttcttttccacatctcattgtcactgacatttaatggtactgtatattacttaatttattgaagattattatttatgtcttattaggacactatggttataaactgtgtttaagcctacaatcattgatttttttttgttatgtcacaatcagtatattttctttggggttacctctctgaatattatgtaaacaatccaaagaaatgattgtattaagatttgtgaataaatttttagaaatctgattggcatattgagatatttaaggttgaatgtttgtccttaggataggcctatgtgctagcccacaaagaatattgtctcattagcctgaatgtgccataagactgaccttttaaaatgttttgagggatctgtggatgcttcgttaatttgttcagccacaatttattgagaaaatattctgtgtcaagcactgtgggttttaatatttttaaatcaaacgctgattacagataatagtatttatataaataattgaaaaaaattttcttttgggaagagggagaaaatgaaataaatatcattaaagataactcaggagaatcttctttacaattttacgtttagaatgtttaaggttaagaaagaaatagtcaatatgcttgtataaaacactgttcactgtttttttcaaaaaaaaaacttgatttgttattaacattgatctgctgacaaaacctgggaatttgggttgtgtatgcgaatgtttcagtgcctcagacaaatgtgtatttaacttatgtaaaagataagtctggaaataaatgtctgtttatttttgtactatttaaaaattgacagatcttttctgaagataaactttgattgtttctatacatctttgtcatatg

SEQ ID NO: 479 - DNA, 395 bp, Homo sapiens
  misc_feature: Incyte ID No: 337171.3
ctgagagcagagctggccgcagccatgaccccgcagcttctcctggcccttgtcctctgggccagctgcccgccctgcagtggaaggaaagggcccccagcagctctgacactgccccgggtgcaatgccgagcctctcggtacccgatcgccgtggattgctcctggaccctgccgcctgctccaaactccaccagccccgtgtccttcattgccacgtacaggtcggagagcctggaagggggcctcagggacactggacttcctggagagcccagaactctggccctgagagccctggggtcaggaaaactggagaccccgacatcctgaaccccaggcctatggaattctagggcggccccgtccaatagaaatatactttctgggccagg

SEQ ID NO: 480 - DNA, 2451 bp, Homo sapiens
  misc_feature: Incyte ID No: 035282CB1
ctcacacctacagtggactacccgatttttcgcttctcttcagggatgagtcatgtggtggtgaaaaatgaccctgaactggaccagcagcttgctaatctggacctgaactctgaaaaacagagtggaggagcaagtacagcgagcaaagggcgctatatacctcctcacttaaggaacagagaagcatctaaaggattccatgataaagacagttcaggttggagttgcagcaaagataaggatgcatatagcagttttgggtctcgagattctagaggaaagcctggttatttcagtgaacgtggaagtggatcaaggggaagatttgatgatcgtggacggagtgactatgatggtattggcaatcgtgaaagatctggctttggcagatttgaacggagtggacatagtcgttggtgtgacaagtcagttgaagatgattggtcaaaaccacttccaccaagtgaacgcttggagcaagaactgttttctggaggaaacacggggattaactttgagaaatatgatgatataccagtagaggcaaccggcagtaactgtcctccacatattgagaattttagcgatattgacatgggagaaattatcatggggaacattgaacttactcgctatactcgtcctactccagtgcaaaaacatgccattcctattattaagggaaaaagagacttaatggcttgtgcccaaacaggatctgggaaaactgcagcatttcttttacccatactgagtcagatatatacagatggtccaggagaagctttgaaggctgtgaaggtaaatggaaggtatgggcgccgcaaacaatatccaatatccttggttttagccccaacaagagaattggctgtacagatctatgaggaagccagaaaattttcctaccgatctagagttcgtccttgtgtagtttatggtggtgctgatattggtcagcagattcgggacttagaacgtggatgccacttgttagtagccactccaggacgtctagtggatatgatggaaagaggaaagattggattagacttctgcaagtacttagtgttggatgaagctgataggatgctggatatgggatttgaacctcagatacgtcgtatagttgaacaagatactatgccaccaaagggcgttcgtcacaccatgatgtttagtgctacttttcctaaggaaatacagatgcttgctcgtgactttttggatgaatatatctttttggctgtaggcagagtaggctctacctctgagaacatcacacagaaagtagtttgggtggaagacttagataaacggtcatttctactggacattttaggtgcaacagggagtgattcacttactttagtgtttgtggagaccaaaaagggagcagattccctggaggatttcttataccatgaaggatatgcttgtactagtattcatggagaccggtcacagagagatcgagaggaggcccttcaccagtttcgctcaggaaaaagcccaattctagtggctacagctgtggcagcacgaggactagacatttcaaatgtgagacatgttatcaattttgatttgccaagtgatattgaagaatatgtgcatcgtattggccgtacaggacgtgtaggaaacctgggccttgccacctcattctttaatgaaaaaaatatgaatattacaaaggatttgttggatcttcttgtagaagctaaacaagaagtgccttcttggttggaaaatatggcttatgaacaccactacaagggtggcagtcgtggacgatctaaaagtaatagattcagtggaggatttggtgccagagactatcgacaaagtagtggttccagcagttctggctttggtgctagtcgcggaagcagcagccgcagtggtggaggtggttacggcaacagcagaggatttggtggaggtggctatggaggcttctacaatagtgatggatatggaggaaattataactcccagggggttgactggtggggcaactgaatctgctttgcagcaaagtcacccttacaaagaagctaatatggaaaccacatgtaacttagccagactatattgtgtagcttcaagaacttgcagtacattaccagctgtgattctcctgataattcaagggagctcaaagtcacaagaagaaaaatgaaaggaaaaaacagcagccctattcagaaattggtttgaagatgtaattgctctagtttggattaaactcttcccctcctgctttagtgccaccccaaactgcatttataattttgtgactgaggatcgtttgtttgttaacgtactgtgactttaactttagacaacttactactttgatgtcctgttggctcagtaatgctcacgataccaattgttttgacaaaataaatttactaaacttggcctaaaaaaaaaaaaaaa

SEQ ID NO: 481 - DNA, 905 bp, Homo sapiens
  misc_feature: Incyte ID No: 350667.7
atgaccctgaactggaccagcagcttgctaatctggacctgaactctgaaaaacagagtggaggagcaagtacagcgagcaaagggcgctatatacctcctcacttaaggaacagagaagcatctaaaggattccatgataaagacagttcaggttggagttgcagcaaagataaggatgcatatagcagttttgggtctcgagattctagaggaaagcctggttatttcagtgaacgtggaagtggatcaaggggaagatttgatgatcgtggacggagtgactatgatggtattggcaatcgtgaaagacctggctttggcagatttgaacggagtggacatagtcgttggtgtgacaagtcagttgaagatgattggtcaaaaccacttccaccaagtgaacgcttggagcagtaagtttttgaaatgtatgttaattgttatgaaatttattgcttagtataacatgtatgtaataattgtttgatttcagagaactgttttctggaggaaacacggggattaactttgagaaatatgatgatataccagtagaggcaaccggcagtaactgtcctccacatattgagaattttagcgatattgacatgggagaaattatcatggggaacattgaacttactcgctatactcgtcctactccagtgcaaaaacatgccattcctattattaagggaaaaagagacttaatggcttgtgcccaaacaggatctgggaaaactgcagcatttcttttacccatactgagtcagatatatacagatggtccaggagaagctttgaaggctgtgaaggtaaaggttttgttataaaatcagacatttttgttttaaaaagctttgcaaagccctgttgacttttctaacggatgccagatacacc

SEQ ID NO: 482 - DNA, 798 bp, Homo sapiens
  misc_feature: Incyte ID No: 575983CB1
ctcgagccgctcgagccgggccccttgtctgcagagatggctcccaatgcttcctgcctctgtgtgcatgtccgttccgaggaatgggatttaatgacctttgatgccaacccatatgacagcgtgaaaaaaatcaaagaacatgtccggtctaagaccaaggttcctgtgcaggaccaggttcttttgctgggctccaagatcttaaagccacggagaagcctctcatcttatggcattgacaaagagaagaccatccaccttaccctgaaagtggtgaagcccagtgatgaggagctgcccttgtttcttgtggagtcaggtgatgaggcaaagaggcacctcctccaggtgcgaaggtccagctcagtggcacaagtgaaagcaatgatcgagactaagacgggtataatccctgagacccagattgtgacttgcaatggaaagagactggaagatgggaagatgatggcagattacggcatcagaaagggcaacttactcttcctggcatcttattgtattggagggtgaccaccctgggcatggggtgttggcaggggtcaaaaagcttatttcttttaatctcttactcaacgaacacatcttctgatgatttcccaaaattaatgagaatgagatgagtagagtaagatttgggtgggatgggtaggatgaagtatattgcccaactctatgtttctttgattctaacacaattaattaagtgacatgatttttactaatgtattactgagactagtaaataaatttttaaggcaaaatagaaaaaaaaaa

SEQ ID NO: 483 - DNA, 2220 bp, Homo sapiens
  misc_feature: Incyte ID No: 208212.6
aaaggtgaatggggttgccctgaggttctgaattgaagaagaggccgggagtgggtggctaggtaatgatcctgagatcattcctggttctcaaagaaaggagatgtttaccagaacagaatctgtttcggctttaaatgattatagttaataccaatagttatcaatttgcatattatcctcatctcaaaatccaaatgcatttttaaaattggctaacttttaatttactaatatattgccggtataattttaactttgatttttgttgttcactcacgtgtgtgtgtgtgcgtgtgtgtgtgtgtgtgtaggggttttcacacaaaagtctagagctttagtatttcggggtcttttagcgctagcattgcccttgtctgccagcttttgctggcagtaaaaggcagtgtatttgaggtaggtggcatttcttactgccctttaaatgtgtttcttttggattttacaggtagcccctgaagaagatgaaaggaaaaagaggcgacgagaaagaaataagattgcagctgcaaagtgccgaaacaagaagaaggagaagacggagtgcctgcagaaagtgagtgccttctagccttacccttcctctcgctcacgcctgtcttcaccagcttcatgtggctatcagaagaagagttagaaaaccccctacttggttatagtttcccaagaagggccttgtagctggtagcagaaatgccagttgcagaatgaggaggtggcaaagcagttaacacaatggatgtgacggtggatgtataaaaacaggtgtgtgaattcgtctgatgcctgactcccagcagcctcggccggttcatacatgtccatcagcttccaggctgcaggacatgccagcccagttaaagaggcttcacttgactgttttcctgagaaaaggaagctgccagctctcatttggctcactatgaaaagcctttaattaatctcttcaaacaagttatttccttaatccacaagcagtggttacacttgctttgcattcttgtctggttcctaactctagagcccttctccctggcttagccagtaagctgagcccctggctgcgttcagccggcccgcctgagagacactaggggaaatagcttttgtgggcaagcagggtggccggtggtgctcagcagtctttccagtggctgtgtccctcctccaaatgtggacaggccatgacagagtcttagcccaagtcccacagatccccaaaagttctgttgattgcttcaggggatcagtgaaaattagggaattttgtgtgttgctatatacattttttctggggagatgagcttctcattgagatctgtgactcagaatcgactaagccaccataagtctggatttctccccagctcccaaggcccttttgggtccagaagacctgcatatgggctgttgactcatgcaaatgaggtatctgaactgcagcttcagtattagcagagccacaggccgcctctgtggcatcaccagggtttctctgaagaagagggtctgcattttcctaaacccagtgctgctctcccatctcccatcttcctctcgcagcttgatgagccccggtgtgtcccaggtacacccctgcatccaggcagcagcccaggccaccccctcctcactggcccttggctcctttcttgatgcctctgttgcttgtcccccaggagtcggagaagctggaaagtgtgaatgctgaactgaaggctcagattgaggagctcaagaacgagaagcagcatttgatatacatgctcaaccttcatcggcccacgtgtattgtccgggctcagaatgggaggactccagaagatgagagaaacctctttatccaacagataaaagaaggaacattgcagagctaagcagtcgtggtatgggggcgactggggagtcctcattgaatcctcattttatacccaaaaccctgaagccattggagagctgtcttcctgtgtacctctagaatcccagcagcagagaaccatcaaggcgggagggcctgcagtgattcagcaggcccttcccattctgccccagagtgggtcttggaccagggcaagtgcatctttgcctcaactccaggatttaggccttaacacactggccattcttatgttccagatggcccccagctggtgtcctgcccgcctttcatctggattctacaaaaaaccaggatgc

SEQ ID NO: 484 - DNA, 2717 bp, Homo sapiens
  misc_feature: Incyte ID No: 1097750.1
  unsure 1603-1604: a, t, c, g, or other
cccagaatggaaagagacttgcctaaggacacgcggtgagttaagaggtagagtgggatccaggacgcaggtctccaggccctggcctggtctctttctagtttctgaatgcccacttcactagcttttgggcatcagctgtcatggagcactggggatgttggctgatgtgtctcctttctttatcttagatccgagagactgaggtcatcgacccccaggacctcctagaaggccgatacttctccggagccctaccagacgatgaggatgtagtggggcccgggcaggaatctgatgactttgagctgtctggctctggagatctggatgacttggaagactccatgatcggccctgaagttgtccatcccttggtgcctctagataaccatatccctgagagggcagggtctgggagccaagtccccaccgaacccaagaaactagaggagaatgaggttatccccaagagaatctcacccgttgaagagagtgaggatgtgtccaacaaggtgtcaatgtccagcactgtgcagggcagcaacatctttgagagaacggaggtcctggcagctctgattgtgggtggcatcgtgggcatcctctttgccgtcttcctgatcctactgctcatgtaccgtatgaagaagaaggatgaaggcagctatgacctgggcaagaaacccatctacaagaaagcccccaccaatgagttctacgcgtgaagcttgcttgtgggcactggcttggactttagcggggagggaagccaggggattttgaagggtggacattagggtagggtgaggtcaacctaatactgacttgtcagtatctccagctctgattacctttgaagtgttcagaagagacattgtcttctactgttctgccaggttcttcttgagctttgggcctcagttgccctggcagaaaaatggattcaacttggcctttctgaaggcaagactgggattggatcacttcttaaacttccagttaagaatctaggtccgccctcaagcccatactgaccatgcctcatccagagctcctctgaagccagggggctaacggatgttgtgtggagtcctggctggaggtcctcccccagtggccttcctcccttcctttcacagccggtctctctgccaggaaatgggggaaggaactagaaccacctgcaccttgagatgtttctgtaaatgggtacttgtgatcacactacgggaatctctgtggtatatacctggggccattctaggctctttcaagtgacttttggaaatcaaccttttttatttgggggggaggatggggaaaagagctgagagtttatgctgaaatggatttatagaatatttgtaaatctatttttagtgtttgttcgtttttttaactgttcattcctttgtgcagagtgtatatctctgcctgggcaagagtgtggaggtgccgaggtgtcttcattctctcgcacatttccacagcacctgctaagtttgtatttaatggtttttgtttttgtttttgtttgtttcttgaaaatgagagaagagccggagagatgatttttattaattttttttttttttgattnnttttactattatagctttagatagggcctcccttcccctcttctttctttgttctctttcattaaaccccttccccagttttttttttatactttaaaccccgctcctcatggccttggccctttctgaagctgcttcctcttataaaatagcttttgccgaaacatagtttttttttagcagatcccaaaatataatgaaggggatggtgggatatttgtgtctgtgttcttataatatattattattcttccttggttctagaaaaatagataaatatatttttttcaggaaatagtgtggtgtttccagtttgatgttgctgggtggttgagtgagtgaattttcatgtggctgggtgggtttttgcctttttctcttgccctgttcctggtgccttctgatggggctggaatagttgaggtggatggttctaccctttctgccttctgtttgggacccagctggtgttctttggtttgctttcttcaggctctagggctgtgctatccaatacagtaaccacatgcggctgtttaaagttaagccaattaaaatcacataagattaaaaattccttcctcagttgcactaaccacgtttctagaggcgtcactgtatgtagttcatggctactgtactgacagcgagagcatgtccatctgttggacagcactattctagagaactaaactggcttaacgagtcacagcctcagctgtgctgggacgacccttgtctccctgggtaggaggggggggaatgggggagggctgatgaggccccagctggggcctgttgtctgggaccctccctctcctgagaggggaggcctggtggcttagcctgggcaggtcgtgtctcctcctgaccccagtggctgcggtgaggggaaccaccctcccttgctgcaccagtggccattagctcccgtcaccactgcaacccagggtcccagctggctgggtcctcttctgcccccagtgcccttccccttgggctgtgttggagtgagcacctcctctgtaggcacctctcacactgttgtctgttactgattttttttgataaaaagataataaaacctggtactttccaaaaaaaaaaaaaagg

SEQ ID NO: 485 - DNA, 2674 bp, Homo sapiens
  misc_feature: Incyte ID No: 227742.6
gcgccgcgtccttgcccccaggactcggccccatggagacgccgccggccgccgctggcgcatggcgggtaggagctgtggcgcggggccttccaggagtctgagctatgagtggcccctgtggagagaagcctgtcctggaagccagccccaccatgagtctgtgggaatttgaggacagccacagccgtcagggcaccccaaggccgggtcaagagctggccgctgaggaggcctcggccctggaactgcagatgaaggtggacttcttccggaagctgggctattcatccacggagatccacagcgtcctgcagaagctgggcgtccaggcagacaccaacacggtgctgggtgagctggtgaaacacgggacagccaccgagcgggagcgccagacctcaccggacccctgccctcagctccctctagtcccgcggggtggtggcacccctaaggctcccaacctggagcctccactcccagaagaggaaaaggagggcagcgacctgagaccagtggtcatcgatgggagcaacgtggccatgagccatgggaacaaggaggtcttctcctgccggggcatcctgctggcagtgaaactggtttctggagcggggccacacagacatcacagtgtttgtgccatcctggaggaaggagcagcctcggcccgacgtgcccatcacagaccagcacatcctgcgggaactggagaagaagaagatcctggtgttcacaccatcacgacgcgtgggtggcaagcgggtggtgtgctatgacgacagattcattgtgaagctggcctacgagtctgacgggatcgtggtttccaacgacacataccgtgacctccaaggcgagcggcaggagtggaagcgcttcatcgaggagcggctgctcatgtactccttcgtcaatgacaagtttatgccccctgatgacccactgggccggcacgggcccagcctggacaacttcctgcgtaagaagccactcactttggagcacaggaagcagccgtgtccctatggaaggaaatgcacctatgggatcaagtgccgattcttccacccagagcggccaagctgcccccagcgctctgtggcagatgagctccgtgccaatgctctcctctcaccccccagagccccaagcaaggacaaaaatggccggcggccttcaccttcatcccagtccagctctctgctaacagagagtgagcagtgcagcctggatgggaagaagctgggggcccaggcatccccagggtcccgccaagagggtctaacacagacctatgccccatcaggcaggagcctcgcacctagcgggggcagtggcagcagctttgggcccacagactggctcccacagacgctggactcactcccgtacgtctcccaggattgcctggactcgggcattggctccctggagagccagatgtcggaactttggggggttcgaggaggaggccctggtgagccgggcccaccccgagccccttacacgggctacagtccctatggatctgagctcccagccaccgcagccttctctgcctttggccgggccatgggtgctggccacttcagtgtccctgccgactacccacccgcgccccctgcctttccacctcgagagtactggtctgaaccatacccactgcccccacccacatcagtccttcaggagcccccagtgcagagcccaggggctggcacggagcccgtggggcagggcaggcagcctggccaaggagcaggccagcgtgtatactaagctgtgtggtgtgtttcccccgcacctggtggaggctgtgatggggcgcttcccacagctcctggacccccagcagctggctgccgagatcctctcctacaagtcccagcaccccagtgagtaagctgcctgtggctggcaaggggcagcacccccagcctccaagggccgtcaggctgggctttgggccattgagcagcccattcccagccctgaggcccaccccagaggctggacagagggaggattcaagtcgggaaggaaacccacaaaccaaagatactgtaggattggttctggcccatgcagcacctctagctgtctgcctcagtgggtcagaagcgatcaccctgttgatacacattgtatctctgtagtttaaggagacgctgccggtaacggcgtcggtccgtggctgaggcccaaaccgtcttttctctcagagggtggggagggaggtgggggcagcagaggcctgggctgggtgccctgtgcacgccaccccacttccgccctacccctgggacgttggccttggctggctagttgggcaccgtgtgcctgccctccaagggcctcctctacgccaatgaggcctcatctgtgctctcgctgggcacgtggcttcatgtcagtaagcaagatgcttcttaataacccaccttctgccccactctattccttatcctgctgcccctgtaggggtcaagggccctccgtctacaccctcttcttctcctccatcctttattcagagtcatctcgcccttccccatgggtgggggaacctgtgtttgtttgtgtgcacatgtaaattttaaatattttaagcagaaagtccttacctcctgtaacacatcaataaagtacaatcattgtgagccctttc

SEQ ID NO: 486 - DNA, 1243 bp, Homo sapiens
  misc_feature: Incyte ID No: 246029.11
tcctcggtatatcttggggactggaggacctgtctggttattatacagacgcataactggaggtgggatccacacagctcagaacagctggatcttgctcagtctctgccaggggaagattccttggaggaggccctgcagcgacatggagggagctgctttgctgagagtctctgtcctctgcatctgggtgcaacaaaacgttccaagtgggacagatactggagatcctcaaagtaagcccctgcggtgactgggctgctggcaccatggacccagagagcagtatctttattgaggatgccattaagtatttcaaggaaaaagtgagcacacagaatctgctactcctgctgactgataatgaggcctggaacggattcgtggctgctgctgaactgcccaggaatgaggcagatgagctccgtaaagctctggacaaccttgcaagacaaatgatcatgaaagacaaaaactggcacgataaaggccagcagtacagaaactggtttctgaaagagtttcctcggttgaaaagtgagcttgaggataacataagaaggctccgtgcccttgcagatggggttcagaaggtccacaaaggcaccaccatcgccaatgtggtgtctggctctctcagcatttcctctggcatcctgaccctcgtcggcatgggtctggcacccttcacagagggaggcagccttgtactcttggaacctgggatggagttgggaatcacagccgctttgaccgggattaccagcagtaccatggactacggaaagaagtggtggacacaagcccaagcccacgacctggtcatcaaaagccttgacaaattgaaggaggtgagggagtttttgggtgagaacatatccaactttctttccttagctggcaatacttaccaactcacacgaggcattgggaaggacatccgtgccctcagacgagccagagccaatcttcagtcagtaccgcatgcctcagcctcacgcccccgggtcactgagccaatctcagctgaaagcggtgaacaggtggagagggttaatgaacccagcatcctggaaatgagcagaggagtcaagctcacggatgtggcccctgtaagcttctttcttgtgctggatgtagtctacctcgtgtacgaatcaaagcacttacatgagggggcaaagtcagagacagctgaggagctgaagaaggtggctcaggagctggaggagaagctaaacat

SEQ ID NO: 487 - DNA, 2191 bp, Homo sapiens
  misc_feature: Incyte ID No: 246029.4
tgagctgctgggaagttgtgactttcactttccctttcgaattcctcggtatatcttggggactggaggacctgtctggttattatacagacgcataactggaggtgggatccacacagctcagaacagctggatcttgctcagtctctgccaggggaagattccttggaggaggccctgcagcgacatggagggagctgctttgctgagagtctctgtcctctgcatctggatgagtgcacttttccttggtgtgggagtgagggcagaggaagctggagcgagggtgcaacaaaacgttccaagtgggacagatactggagatcctcaaagtaagcccctcggtgactgggctgctggcaccatggacccagagagcagtatctttattgaggatgccattaagtatttcaaggaaaaagtgagcacacagaatctgctactcctgctgactgataatgaggcctggaacggattcgtggctgctgctgaactgcccaggaatgaggcagatgagctccgtaaagctctggacaaccttgcaagacaaatgatcatgaaagacaaaaactggcacgataaaggccagcagtacagaaactggtttctgaaagagtttcctcggttgaaaagtaagcttgaggataacataagaaggctccgtgcccttgcagatggggttcagaaggtccacaaaggcaccaccatcgccaatgtggtgtctggctctctcagcatttcctctggcatcctgaccctcgtcggcatgggtctggcacccttcacagagggaggcagccttgtactcttggaacctgggatggagttgggaatcacagcagctttgaccgggattaccagcagtaccatagactacggaaagaagtggtggacacaagcccaagcccacgacctggtcatcaaaagccttgacaaattgaaggaggtgaaggagtttttgggtgagaacatatccaactttctttccttagctggcaatacttaccaactcacacgaggcattgggaaggacatccgtgccctcagacgagccagagccaatcttcagtcagtaccgcatgcctcagcctcacgcccccgggtcactgagccaatctcagctgaaagcggtgaacaggtggagagagttaatgaacccagcatcctggaaatgagcagaggagtcaagctcacggatgtggcccctgtaagcttctttcttgtgctggatgtagtctacctcgtgtacgaatcaaagcacttacatgagggggcaaagtcagagacagctgaggagctgaagaaggtggctcaggagctggaggagaagctaaacattctcaacaataattataagattctgcaggcggaccaagaactgtgaccacagggcagggcagccaccaggagagatatgcctggcaggggccaggacaaaatgcaaactctttttttttttcttctgatacggagtcttgctctgtcgccagggtggagcttgcagtgagccgagatatcgccactgcactccagcctgggtgacagagcgagactccgtctcagaaaaaaaaaaaaaaagaatatattgacggaagaatagagaggaggcttgaaggaaccagcaatgagaaggccaggaaaagaaagagctgaaaatggagaaagcccaagagttagaacagttggatacaggagaagaaacagcggctccactacagacccagccccaggttcaatgtcctccgaagaatgaagtctttccctggtgatggtcccctgccctgtctttccagcatccactctcccttgtcctcctgggggcatatctcagtcaggcagcggcttcctgatgatggtcgttggggtggttgtcatgtgatgggtcccctccaggttactaaagggtgcatgtcccctgcttgaacactgaagggcaggtggtgagccatggccatggtccccagctgaggagcaggtgtccctgagaacccaaacttcccagagagtatgtgagaaccaaccaatgaaaacagtcccatcgctcttacccggtaagtaaacagtcagaaaattagcatgaaagcagtttagcattgggaggaagctcagatctctagagctgtcttgtcgccgcccaggattgacctgtgtgtaagtcccaataaactcacctactcatcaagaaaaaaaa

SEQ ID NO: 488 - DNA, 1358 bp, Homo sapiens
  misc_feature: Incyte ID No: 1321069CB1
cggctcgagaaagcaaacaggtctgggaggcagttctgttgccactctctctcctgtcaatgatggatctcagaaataccccagccaaatctctggacaagttcattgaagactatctcttgccagacacgtgtttccgcatgcaaatcaaccatgccattgacatcatctgtgggttcctgaaggaaaggtgcttccgaggtagctcctaccctgtgtgtgtgtccaaggtggtaaagggtggctcctcaggcaagggcaccaccctcagaggccgatctgacgctgacctggttgtcttcctcagtcctctcaccacttttcaggatcagttaaatcgccggggagagttcatccaggaaattaggagacagctggaagcctgtcaaagagagagagcattttccgtgaagtttgaggtccaggctccacgctggggcaacccccgtgcgctcagcttcgtactgagttcgctccagctcggggagggggtggagttcgatgtgctgcctgcctttgatgccctgggtcagttgactggcagctataaacctaacccccaaatctatgtcaagctcatcgaggagtgcaccgacctgcagaaagagggcgagttctccacctgcttcacagaactacagagagacttcctgaagcagcgccccaccaagctcaagagcctcatccgcctagtcaagcactggtaccaaaattgtaagaagaagcttgggaagctgccacctcagtatgccctggagctcctgacggtctatgcttgggagcgagggagcatgaaaacacatttcaacacagcccagggatttcggacggtcttggaattagtcataaactaccagcaactctgcatctactggacaaagtattatgactttaaaaaccccattattgaaaagtacctgagaaggcagctcacgaaacccaggcctgtgatcctggacccggcggaccctacaggaaacttgggtggtggagacccaaagggttggaggcagctggcacaagaggctgaggcctggctgaattacccatgctttaagaattgggatgggtccccagtgagctcctggattctgctggtgagacctcctgcttcctccctgccattcatccctgcccctctccatgaagcttgagacatatagctggagaccattctttccaaagaacttacctcttgccaaaggccatttatattcatatagtgacaggctgtgctccatattttacagtcattttggtcacaatcgagggtttctggaattttcacatcccttgtccagaattcattcccctaagagtaataataaataatctctaacaccaaaaaaaaaaaaaaa

SEQ ID NO: 489 - DNA, 1417 bp, Homo sapiens
  misc_feature: Incyte ID No: 234866.22
gcaaaaggaaagtgcaaagacagctcctcccttctgaggaaacgaaaccaacagcagtccaagctcagtcagcagaagagataaaagcaaacaggtctgggaggcagttctgttgccactctctctcctgtcaatgatggatctcagaaataccccagccaaatctctggacaagttcattgaagactatctcttgccagacacgtgtttccgcatgcaaatcaaccatgccattgacatcatctgtgggttcctgaaggaaaggtgcttccgaggtagctcctaccctgtgtgtgtgtccaaggtggtaaagggtggctcctcaggcaagggcaccaccctcagaggccgatctgacgctgacctggttgtcttcctcagtcctctcaccacttttcaggatcagttaaatcgccggggagagttcatccaggaaattaggagacagctggaagcctgtcaaagagagagagcattttccgtgaagtttgaggtccaggctccacgctggggcaacccccgtgcgctcagcttcgtactgagttcgctccagctcggggagggggtggagttcgatgtgctgcctgcctttgatgccctgggtcagttgactggcggctataaacctaacccccaaatctatgtcaagctcatcgaggagtgcaccgacctgcagaaagagggcgagttctccacctgcttcacagaactacagagagacttcctgaagcagcgccccaccaagctcaagagcctcatccgcctagtcaagcactggtaccaaaattgtaagaagaagcttgggaagctgccacctcagtatgccctggagctcctgacggtctatgcttgggagcgagggagcatgaaaacacatttcaacacagcccagggatttcggacggtcttggaattagtcataaactaccagcaactctgcatctactggacaaagtattatgactttaaaaaccccattattgaaaagtacctgagaaggcagctcacgaaacccaggcctgtgatcctggacccggcggaccctacaggaaacttgggtggtggagacccaaagggttggaggcagctggcacaagaggctgaggcctggctgaattacccatgctttaagaattgggatgggtccccagtgagctcctggattctgctggtgagacctcctgcttcctccctgccattcatccctgcccctctccatgaagcttgagacatatagctggagaccattctttccaaagaacttacctcttgccaaaggccatttatattcatatagtgacaggctgtgctccatattttacagtcattttggtcacaatcgagggtttctggaattttcacatcccttgtccagaattcattcccctaagagtaataataaataatctctaacacc

SEQ ID NO: 490 - DNA, 1283 bp, Homo sapiens
  misc_feature: Incyte ID No: 236030.3
  unsure 90, 105: a, t, c, g, or other
ggaacagccagcaggttttgctaagtcaactgtaatgcccttatccaatcagaattagggagggaaaatggctttgcagataaatatggnacactagccccacgntttctgagacattcctcaattgcttagacatattctgagcctacagcagaggaacctccagtctcagcaccatgaatcaaactgccattctgatttgctgccttatctttctgactctaagtggcattcaaggagtacctctctctagaactgtacgctgtacctgcatcagcattagtaatcaacctgttaatccaaggtctttagaaaaacttgaaattattcctgcaagccaattttgtccacgtgttgagatcattgctacaatgaaaaagaagggtgagaagagatgtctgaatccagaatcgaaggccatcaagaatttactgaaagcagttagcaaggaaaggtctaaaagatctccttaaaaccagaggggagcaaaatcgatgcagtgcttccaaggatggaccacacagaggctgcctctcccatcacttccctacatggagtatatgtcaagccataattgttcttagtttgcagttacactaaaaggtgaccaatcatggtcaccaaatcagctgctactactcctgtaggaaggttaatgttcatcatcctaagctattcagtaataactctaccctggcactataatgtaagctctactgaggtgctatgttcttagtggatgttctgaccctgcttcaaatatttccctcacctttcccatcttccaagggtactaaggaatctttctgctttggggtttatcagaattctcagaatctcaaataactaaaaggtatgcaatcaaatctgctttttaaagaatgctctttacttcatggacttccactgccatcctcccaaggggcccaaattctttcagtggctacctacatacaattccaaacacatacaggaaggtagaaatatctgaaaatgtatgtgtaagtattcttatttaatgaaagactgtacaaagtagaagtcttagatgtatatatttcctatattgttttcagtgtacatggaataacatgtaattaagtactatgtatcaatgagtaacaggaaaattttaaaaatacagatagatatatgctctgcatgttacataagataaatgtgctgaatggttttcaaaataaaaatgaggtactctcctggaaatattaagaaagactatctaaatgttgaaagaccaaaaggttaataaagtaattataact

SEQ ID NO: 491 - DNA, 1626 bp, Homo sapiens
  misc_feature: Incyte ID No: 731497CB1
gttccctctacaaaggacttcctagtgggtgtgaaaggcagcggtggccacagaggcggcggagagatggccttcagcagttcccaggctccctacctgagtccagctgtccccttttctgggactattcaaggaggtctccaggacggacttcagatcactgtcaatgggaccgttctcagctccagtggaaccaggtttgctgtgaactttcagactggcttcagtggaaatgacattgccttccacttcaaccctcggtttgaagatggagggtacgtggtgtgcaacacgaggcagaacggaagctgggggcccgaggagaggaagacacacatgcctttccagaaggggatgccctttgacctctgcttcctggtgcagagctcagatttcaaggtgatggtgaacgggatcctcttcgtgcagtacttccaccgcgtgcccttccaccgtgtggacaccatctccgtcaatggctctgtgcagctgtcctacatcagcttccagcctcccggcgtgtggcctgccaacccggctcccattacccagacagtcatccacacagtgcagagcgcccctggacagatgttctctactcccgccatcccacctatgatgtacccccaccccgcctatccgatgcctttcatcaccaccattctgggagggctgtacccatccaagtccatcctcctgtcaggcactgtcctgcccagtgctcagaggttccacatcaacctgtgctctgggaaccacatcgccttccacctgaacccccgttttgatgagaatgctgtggtccgcaacacccagatcgacaactcctgggggtctgaggagcgaagtctgccccgaaaaatgcccttcgtccgtggccagagcttctcagtgtggatcttgtgtgaagctcactgcctcaaggtggccgtggatggtcagcacctgtttgaatactaccatcgcctgaggaacctgcccaccatcaacagactggaagtggggggcgacatccagctgacccatgtgcagacataggcggcttcctggccctggggccgggggctggggtgtggggcagtctgggtcctctcatcatccccacttcccaggcccagcctttccaaccctgcctgggatctgggctttaatgcagaggccatgtccttgtctggtcctgcttctggctacagccaccctggaacggagaaggcagctgacggggattgccttcctcagccgcagcagcacctggggctccagctgctggaatcctaccatcccaggaggcaggcacagccagggagaggggaggagtgggcagtgaagatgaagccccatgctcagtcccctcccatcccccacgcagctccaccccagtcccaagccaccagctgtctgctcctggtgggaggtggcctcctcagcccctcctctctgacctttaacctcactctcaccttgcaccgtgcaccaacccttcacccctcctggaaagcaggcctgatggcttcccactggcctccaccacctgaccagagtgttctcttcagaggactggctcctttcccagtgtccttaaaataaagaaatgaaaatgcttgttggcacattcaaaaaaaaaaa

SEQ ID NO: 492 - DNA, 3868 bp, Homo sapiens
  misc_feature: Incyte ID No: 2774968CB1
catcaaaactcctatactgacctgagacagaggcagcagtgatacccacctgagagatcctgtgtttgaacaactgcttcccaaaacggaaagtatttcaagcctaaacctttgggtgaaaagaactcttgaagtcatgattgcttcacagtttctctcagctctcactttggtgcttctcattaaagagagtggagcctggtcttacaacacctccacggaagctatgacttatgatgaggccagtgcttattgtcagcaaaggtacacacacctggttgcaattcaaaacaaagaagagattgagtacctaaactccatattgagctattcaccaagttattactggattggaatcagaaaagtcaacaatgtgtgggtctgggtaggaacccagaaacctctgacagaagaagccaagaactgggctccaggtgaacccaacaataggcaaaaagatgaggactgcgtggagatctacatcaagagagaaaaagatgtgggcatgtggaatgatgagaggtgcagcaagaagaagcttgccctatgctacacagctgcctgtaccaatacatcctgcagtggccacggtgaatgtgtagagaccatcaataattacacttgcaagtgtgaccctggcttcagtggactcaagtgtgagcaaattgtgaactgtacagccctggaatcccctgagcatggaagcctggtttgcagtcacccactgggaaacttcagctacaattcttcctgctctatcagctgtgataggggttacctgccaagcagcatggagaccatgcagtgtatgtcctctggagaatggagtgctcctattccagcctgcaatgtggttgagtgtgatgctgtgacaaatccagccaatgggttcgtggaatgtttccaaaaccctggaagcttcccatggaacacaacctgtacatttgactgtgaagaaggatttgaactaatgggagcccagagccttcagtgtacctcatctgggaattgggacaacgagaagccaacgtgtaaagctgtgacatgcagggccgtccgccagcctcagaatggctctgtgaggtgcagccattcccctgctggagagttcaccttcaaatcatcctgcaacttcacctgtgaggaaggcttcatgttgcagggaccagcccaggttgaatgcaccactcaagggcagtggacacagcaaatcccagtttgtgaagctttccagtgcacagccttgtccaaccccgagcgaggctacatgaattgtcttcctagtgcttctggcagtttccgttatgggtccagctgtgagttctcctgtgagcagggttttgtgttgaagggatccaaaaggctccaatgtggccccacaggggagtgggacaacgagaagcccacatgtgaagctgtgagatgcgatgctgtccaccagcccccgaagggtttggtgaggtgtgctcattcccctattggagaattcacctacaagtcctcttgtgccttcagctgtgaggagggatttgaattacatggatcaactcaacttgagtgcacatctcagggacaatggacagaagaggttccttcctgccaagtggtaaaatgttcaagcctggcagttccgggaaagatcaacatgagctgcagtggggagcccgtgtttggcactgtgtgcaagttcgcctgtcctgaaggatggacgctcaatggctctgcagctcggacatgtggagccacaggacactggtctggcctgctacctacctgtgaagctcccactgagtccaacattcccttggtagctggactttctgctgctggactctccctcctgacattagcaccatttctcctctggcttcggaaatgcttacggaaagcaaagaaatttgttcctgccagcagctgccaaagccttgaatcagatggaagctaccaaaagccttcttacatcctttaagttcaaaagaatcagaaacaggtgcatctggggaactagagggatacactgaagttaacagagacagataactctcctcgggtctctggcccttcttgcctactatgccagatgcctttatggctgaaaccgcaacacccatcaccacttcaatagatcaaagtccagcaggcaaggacggccttcaactgaaaagactcagtgttccctttcctactctcaggatcaagaaagtgttggctaatgaagggaaaggatattttcttccaagcaaaggtgaagagaccaagactctgaaatctcagaattccttttctaactctcccttgctcgctgtaaaatcttggcacagaaacacaatattttgtggctttctttcttttgcccttcacagtgtttcgacagctgattacacagttgctgtcataagaatgaataataattatccagagtttagaggaaaaaaatgactaaaaatattataacttaaaaaaatgacagatgttgaatgcccacaggcaaatgcatggagggttgttaatggtgcaaatcctactgaatgctctgtgcgagggttactatgcacaatttaatcactttcatccctatgggattcagtgcttcttaaagagttcttaaggattgtgatatttttacttgcattgaatatattataatcttccatacttcttcattcaatacaagtgtggtagggacttaaaaaacttgtaaatgctgtcaactatgatatggtaaaagttacttattctagattaccccctcattgtttattaacaaattatgttacatctgttttaaatttatttcaaaaagggaaactattgtcccctagcaaggcatgatgttaaccagaataaagttctgagtgtttttactacagttgttttttgaaaacatggtagaattggagagtaaaaactgaatggaaggtttgtatattgtcagatattttttcagaaatatgtggtttccacgatgaaaaacttccatgaggccaaacgttttgaactaataaaagcataaatgcaaacacacaaaggtataattttatgaatgtctttgttggaaaagaatacagaaagatggatgtgctttgcattcctacaaagatgtttgtcagatgtgatatgtaaacataattcttgtatattatggaagattttaaattcacaatagaaactcaccatgtaaaagagtcatctggtagatttttaacgaatgaagatgtctaatagttattccctatttgttttcttctgtatgttagggtgctctggaagagaggaatgcctgtgtgagcaagcatttatgtttatttataagcagatttaacaattccaaaggaatctccagttttcagttgatcactggcaatgaaaaattctcagtcagtaattgccaaagctgctctagccttgaggagtgtgagaatcaaaactctcctacacttccattaacttagcatgtgttgaaaaaaaagtttcagagaagttctggctgaacactggcaacaacaaagccaacagtcaaaacagagatgtgataaggatcagaacagcagaggttcttttaaaggggcagaaaaactctgggaaataagagagaacaactactgtgatcaggctatgtatggaatacagtgttattttctttgaaattgtttaagtgttgtaaatatttatgtaaactgcattagaaattagctgtgtgaaataccagtgtggtttgtgtttgagttttattgagaattttaaattataacttaaaatattttataatttttaaagtatatatttatttaagcttatgtcagacctatttgacataacactataaaggttgacaataaatgtgcttatgtttaaaaaaaaaaaaaaa

SEQ ID NO: 493 - DNA, 3638 bp, Homo sapiens
  misc_feature: Incyte ID No: 400203.1
tcagttttaacaggagcagttccttggagctgtgtggcagcgaaacttgtggctagttgacggggtttggctgaggtgacgggatacatgaaggcttcagaagaaagtataaattccataacagtaggatttaatttctgcaatgatgtcttggggtcaactgcatatggaaatgggtttcttattttcttccatgctttccatgtcttgattctcccagctggtctcagaagtcatcttcattctgcacactcagacttaacttgtaatcaggactcactgaccaggtgcacctgacaccacagctgttttggggcctccttctgctgcaggtttggatcctgccgggcccatgtttgaaggggccgacatccacaagaggctctctccggacgatgcagattttgtggatgtcctccacacctacacgcgttccttcggcttgagcattggtattcagatgcctgtgggccacattgacatctaccccaatgggggtgacttccagccaggctgtggactcaacgatgtcttgggatcaattgcatatggaacaatcacagaggtggtaaaatgtgagcatgagcgagccgtccacctctttgttgactctctggtgaatcaggacaagccgagttttgccttccagtgcactgactccaatcgcttcaaaaaggggatctgtctgagctgccgcaagaaccgttgtaatagcattggctacaatgccaagaaaatgaggaacaagaggaacagcaaaatgtacctaaaaacccgggcaggcatgcctttcagagtttaccattatcagatgaaaatccatgtcttcagttacaagaacatgggagaaattgagcccaccttttacgtcaccctttatggcactaatgcagattcccagactctgccactggaaatagtggagcggatcgagcagaatgccaccaacaccttcctggtctacaccgaggaggacttgggagacctcttgaagatccagctcacctgggagggggcctctcagtcttggtacaacctgtggaaggagtttcgcagctacctgtctcaaccccgcaaccccggacgggagctgaatatcaggcgcatccgggtgaagtctggggaaacccagcggaaactgacattttgtacagaagaccctgagaacaccagcatatccccaggccgggagctctggtttcgcaagtgtcgggatggctggaggatgaaaaacgaaaccagtcccactgtggagcttccctgagggtgcccgggcaagtcttgccagcaaggcagcaagacttcctgctatccaagcccatggaggaaagttactgctgaggacccacccaatggaaggattcttctcagccttgaccctggagcactgggaacaactggtctcctgtgatggctgggactcctcgcgggaggggactgcgctgctatagctcttgctgcctctcttgaatagctctaactccaaacctctgtccacacctccagagcaccaagtccagatttgtgtgtaagcagctgggtgcctggggcctctcgtgcacactggattggtttctcagttgctgggcgagcctgtactctgcctgacgaggaacgctggctccgaagaggccctgtgtagaaggctgtcagctgctcagcctgctttgagcctcagtgagaagtccttccgacaggagctgactcatgtcaggatggcaggcctggtatcttgctcgggccctagctgttggggttctcatgggttgcactgaccatactgcttacgtcttagccattccgtcctgctccccagctcactctctgaagcacacatcattggctttcctatttttctgttcattttttaattgagcaaatgtctattgaacacttaaaattaattagaatgtggtaatggacatattactgagcctctccatttggaacccagtggagttgggatttctagaccctctttctgtttggatggtgtatgtgtatatgcatggggaaaggcacctggggcctgggggaggctatacggatataagcattagggaccctgaggctttaagtggtttctatttcttcttagttattatgtgccaccttcttagttattatgtgccacctcccctatgagtgacgtgtttgatcactagcagaatagcaagcagagtatcattcatgctggggccagaatgatggccggttgccagatataactgctttggagcaaatctcttctgtttagagagatagaagttatgacatatgtaatacacatctgtgtacacagaaaccggcacctgccagacagagctggttctaagatttaatacagtgctttttttcctctttgaaatattttactttaataccagtgccttttcttgttgaacttcttggaaaagccaccaattctagatcttgatttgaattaatacacacaatatctgagacacttacacttttcaaaagatttgtgtatgcattgcctaattagagtagggggagaagggcaactattattatccctattttacaaaactgaggcttagtgaggttcagccacatgcctagacttatatactagttagtggtgcagccagggagaggactcagatttcctggaggcaaagtctatctctgaaactccatgaagacttttgcagccagttcccaccaatatgccccagacgtgagacaaacaaggacttttttttttatatagagccatccataaaatcctaagcccttttattaatgtataaccaggagaacatctgtgccaacggttggactttttatggctgagattcgggaggaagtgtgacaccaagcaggagaggaagaatgattttctttgtacttaggttttctaaggacattgttttaatctgtatcgtgccaaagttgtatcactgttaaacttctgaagacataaccagttgagtcttatttcaagatatgttctcaagccaattgtgtgcttctcttgtttctgtgattgctttctagccaaagcgaagcttgtacaggttgagtatcccttatccaaaatgcttggaaccagaagtgtttcaaattttagattattttcagattttggaatgtttgcatatacataatgagatattttgggaataggacccgagcctaaacacaaaattcattgatgtgtcagttacaccttatccacatagcctgagggtaattttatacgatattttaaatagttgtgtacatgaagcatggtttgtggtaacttatgtgaggggttttcccattttttgtcttgttggtgctcaaaaagttttggattttggagcatttcggattttggatttttggattagggttgctcaacccatattattggctgtacatcctggtcacttctgacttctgtttttactaatggaagctttgcaaattgaattctcagtgagttgtatatttatacacctggcttgaagccttaattgtatataatgatgctttttaaaaaatgctatttggaagactatttatttctcgtgtatataatgtatataaaaaaatatggttagtgtttacctaaggttaaccaatttcaagattaaaatttttaaatagtaaaataataaaaaatt

SEQ ID NO: 494 - DNA, 987 bp, Homo sapiens
  misc_feature: Incyte ID No: 222839.1
gctgacttcctaggatctggaatctggtcagcaatcaggaatcccttcatcgtgacccccgcatgggcaaaggcttccctggaatctcccacactgtctgctccctataaaaggcaggcagatgggccagaggagcagagaggctgagaccaacccagaaaccaccacctctcacgccaaagctcacaccttcagcctccaacatgaaggtctccgcagcacttctgtggctgctgctcatagcagctgccttcagcccccaggggctcactgggccagcttctgtcccaaccacctgctgctttaacctggccaataggaagataccccttcagcgactagagagctacaggagaatcaccagtggcaaatgtccccagaaagctgtgatcttcaagaccaaactggccaaggatatctgtgccgaccccaagaagaagtgggtgcaggattccatgaagtatctggaccaaaaatctccaactccaaagccataaataatcaccatttttgaaaccaaaccagagcctgagtgttgcctaatttgttttcccttcttacaatgcattctgaggtaacctcattatcagtccaaagggcatgggttttattatatatatatatattttttttaaaaaaaaaaacgtattgcatttaatttattgaggctttaaaacttatcctccatgaatatcagttatttttaaactgtaaagctttgtgcagattctttaccccctgggagccccaattcgatcccctgtcacgtgtgggcaatgttccccctctcctctcttcctccctggaatcttgtaaaggtcctggcaaagatgatcagtatgaaaatgtcattgttcttgtgaacccaaagtgtgactcattaaatggaagtaaatgttgttttaggaatacataaagtatgtgcatattttattatagtcactagttgtaatttttttgtgggaaatccacactgagctgaggggg

SEQ ID NO: 495 - DNA, 2905 bp, Homo sapiens
  misc_feature: Incyte ID No: 4511339CB1
agcggaccccagcctctgccaggttcggtccgccatcctcgtcccgtcctccgccggcccctgccccgcgcccagggatcctccagctcctttcgcccgcgccctccgttcgctccggacaccatggacaagttttggtggcacgcagcctggggactctgcctcgtgccgctgagcctggcgcagatcgatttgaatataacctgccgctttgcaggtgtattccacgtggagaaaaatggtcgctacagcatctctcggacggaggccgctgacctctgcaaggctttcaatagcaccttgcccacaatggcccagatggagaaagctctgagcatcggatttgagacctgcaggtatgggttcatagaagggcacgtggtgattccccggatccaccccaactccatctgtgcagcaaacaacacaggggtgtacatcctcacatccaacacctcccagtatgacacatattgcttcaatgcttcagctccacctgaagaagattgtacatcagtcacagacctgcccaatgcctttgatggaccaattaccataactattgttaaccgtgatggcacccgctatgtccagaaaggagaatacagaacgaatcctgaagacatctaccccagcaaccctactgatgatgacgtgagcagcggctcctccagtgaaaggagcagcacttcaggaggttacatcttttacaccttttctactgtacaccccatcccagacgaagacagtccctggatcaccgacagcacagacagaatccctgctaccagtacgtcttcaaataccatctcagcaggctgggagccaaatgaagaaaatgaagatgaaagagacagacacctcagtttttctggatcaggcattgatgatgatgaagattttatctccagcaccatttcaaccacaccacgggcttttgaccacacaaaacagaaccaggactggacccagtggaacccaagccattcaaatccggaagtgctacttcagacaaccacaaggatgactgatgtagacagaaatggcaccactgcttatgaaggaaactggaacccagaagcacaccctcccctcattcaccatgagcatcatgaggaagaagagaccccacattctacaagcacaatccaggcaactcctagtagtacaacggaagaaacagctacccagaaggaacagtggtttggcaacagatggcatgtgggatatcgccaaacacccaaagaagactcccattcgacaacagggacagctgcagcctcagctcataccagccatccaatgcaaggaaggacaacaccaagcccagaggacagttcctggactgatttcttcaacccaatctcacaccccatgggacgaggtcatcaagcaggaagaaggatggatatggactccagtcatagtacaacgcttcagcctactgcaaatccaaacacaggtttggtggaagatttggacaggacaggacctctttcaatgacaacgcagcagagtaattctcagagcttctctacatcacatgaaggcttggaagaagataaagaccatccaacaacttctactctgacatcaagcaataggaatgatgtcacaggtggaagaagagacccaaatcattctgaaggctcaactactttactggaaggttatacctctcattacccacacacgaaggaaagcaggaccttcatcccagtgacctcagctaagactgggtcctttggagttactgcagttactgttggagattccaactctaatgtcaatcgttccttatcaggagaccaagacacattccaccccagtggggggtcccataccactcatggatctgaatcagatggacactcacatgggagtcaagaaggtggagcaaacacaacctctggtcctataaggacaccccaaattccagaatggctgatcatcttggcatccctcttggccttggctttgattcttgcagtttgcattgcagtcaacagtcgaagaaggtgtgggcagaagaaaaagctagtgatcaacagtggcaatggagctgtggaggacagaaagccaagtggactcaacggagaggccagcaagtctcaggaaatggtgcatttggtgaacaaggagtcgtcagaaactccagaccagtttatgacagctgatgagacaaggaacctgcagaatgtggacatgaagattggggtgtaacacctacaccattatcttggaaagaaacaaccgttggaaacataaccattacagggagctgggacacttaacagatgcaatgtgctactgattgtttcattgcgaatcttttttagcataaaattttctactctttttgttttttgtgttttgttctttaaagtcaggtccaatttgtaaaaacagcattgctttctgaaattagggcccaattaataatcagcaagaatttgatcgttccagttcccacttggaggcctttcatccctcgggtgtgctatggatggcttctaacaaaaactacacatatgtattcctgatcgccaacctttcccccaccagctaaggacatttcccagggttaatagggcctggtccctgggaggaaatttgaatgggtccattttggccttccatagcctaatccctgggcattgctttccactgaggttgggggttggggtgtactagttacacatcttcaacagaccccctctagaaatttttcagatgcttctgggagacacccaaagggtgaagctatttatctgtagtaaactatttatctgtgtttttgaaatattaaaccctggatcagtcctttgatcagtataattttttaaagttactttgtcagaggcacaaaagggtttaaactgattcataataaatatctgtactt

SEQ ID NO: 496 - DNA, 2755 bp, Homo sapiens
  misc_feature: Incyte ID No: 1382920.30
gcgggcctaagcggtggcgggggccgggcgcggttcccggggcgcgcgctggggcgggccgggggtgtggccacccgcgggctctcccgcctccctgcgcccttctggaaaatggaggctgctcgaggtttccgaggacttctctggcgcagaaagtcggggcagctggttcttctcggctgtaccctgagaatgctccctcctaggccagggccgcctctgcacacccttcttttttaaggagaccttggtgtcctgaaatcctggggttgcaagactgccagcctgtgtgatcaatcctgcggttaggaaggtggagttttgctttcccatcttttcctctgcctccggcatttggccctaaatgccagcgttttttgcttaggtatccagctcccgtccgcctgtgtgtggcggagctgctgggtaacggtgtcgaatagcaaaccttgggggctggcgggaggtggcttatcttgtgggtagatccctctcgagcagccgtatccacctctcggctctgcttatctctaagtcccacttgctttgaagcatatctctaggaatcgccccttctgcagtcaccgaagtgtcacctgaccttgcgcctaggggacctaatttatcttttatgtatcttactgtaagaggtgtggagtttggcctactaattgaacccccagttcttggataaagtccaccgacagttactgggcaagaaatttttcagtgatcagtggaatcaattttcccaaatcttggtcttaggcagtgtcgtgggagtcttccttagaattgccttgtgattgtccaaactatcccaagaataaatgtgttccaaatggatttgaaaacaggcctgtatttctgtgactgtcactgcctttcacaaacacttgactacatcaaatgtctaaaactgaaaatcaaatttttgtgatataactattataaaagtatgtttacatcaacatactgtccacatttgccaccttgcatgggggtttttaatttgtgtgtgtgtgtgagagacagagtctcgctctgtcgcccaggctggagtgcagtggcgcgatctcggctcactgcagcctccgcctcctgggttcaagtgattctcttacctcaggctcctgagtagctggaattacaggcgcacgccaccacgcccaggtatttttttttatttttagtagagacggggtttcaccatgttgaccaggatggtctcgatctgctgacctcgtgatccgcctgcctcggcctcccaaagtgctgggattacaggctgagccaccgcacccagcaggggtttttaattttataaataaatatgtggtacagctggcagactcctgagctcagttttaaccatgctttaacatggttaatacaggagcagggaggagaaaaggactaagtgcagggtcagtactccagcgccctctcatcagacaatgaattctgacactggctgtaagttttctgtgcagtaatacagatccttaagacattgccccaggcaatgcccataatatcctaaaggttccttgaagttaagtttcaaggatcaagtttcagttttctattttagaatagaaacattactcttgggttcaatccagtagctcatctgccccccagtctccttaggcactgattccttcatgctgtgctttgagaaaggaagcctaggctgacgagaccatcttgcctccctgtagatcgtcacagctacctgtctctggggatccctagtataacacattcagtgttcccctttcagtcttactactttgaccgcgatgatgtggctttgaagaactttgccaaatactttcttcaccaatctcatgaggagagggaacatgctgagaaactgatgaagctgcagaaccaacgaggtggccgaatcttccttcaggatatcaaggtgaacaaaagatcctaggggtgtcatacttcatcatctggcagtgttcgggtatcagaaatcacttaaactagcaattgcccttataaagtgatgatacactgggcttttgccttttgtgcttttttaggcttaccatctaaactaaattaggcaaatagtaatgtcccttttgccaaaacgtggtggttagagatgatgggcttgctgacttctaggttagttggtagagatgcattaacctattctcattcagaaaccagactgtgatgactgggagagcgggctgaatgcaatggagtgtgcattacatttggaaaaaaatgtgaatcagtcactactggaactgcacaaactggccactgacaaaaatgacccccatgtgagtattggaaccccaggaaataaatggaggaaatcatttgccttagggattgggaaagctgcccactaactgtcttccccattgttttgcagttgtgtgacttcattgagacacattacctgaatgagcaggtgaaagccatcaaagaattgggtgaccacgtgaccaacttgcgcaagatgggagcgcccgaatctggcttggcggaatatctctttgacaagcacaccctgggagacagtgataatgaaagctaagcctcgggctaatttccccatagccgtggggtgacttccctggtcaccaaggcagtgcatgcatgttggggtttcctttaccttttctataagttgtaccaaaacatccacttaagttctttgatttgtaccattccttcaaataaagaaatttggtacccaggaaaaaaaaaaaaaagg

SEQ ID NO: 497 - DNA, 1685 bp, Homo sapiens
  misc_feature: Incyte ID No: 2372662CB1
gagacccagaagggagcgaaggtttttgctgcgccaacgcagtgaccgaaggctccgctcacgcccggcctgatcctgcctgaagatggtgccactggtggctgtggtatcagggccccgtgcccagctctttgcctgcctgctcaggctgggcactcagcaggtcggcccccttcagctgcacaccggggccagccatgcggccaggaaccattatgaggtgctggtgctgggtgggggcagtggcggaatcaccatggctgcccgcatgaagaggaaagtgggtgcagagaatgtggccattgttgagcccagtgagagacatttctaccagccaatctggacactggtgggtgctggtgccaaacaattgtcctcatctggtcgtcccacggcaagtgtgattccatctggtgtagaatggatcaaagctagagtgactgagttgaacccagacaagaactgcattcacacagatgacgacgagaagatctcctaccgatatcttattattgctctcggaatccagctggactatgagaagattaaaggcctacctgaaggtttcgctcatcccaaaatagggtcgaattattcagttaagactgtagagaagacatggaaagctctgcaggacttcaaagagggcaatgccatcttcaccttcccaaatactccagtgaagtgtgctggagcccctcagaagatcatgtacttatcagaagcctacttcaggaagacagggaagcgatccaaggccaatatcattttcaacacttctcttggagccattttcggggttaagaagtatgcagatgccctgcaggagatcatccaggagcggaacctcactgttaactacaagaaaaacctcattgaagtccgagccgataaacaagaggctgtatttgagaacctggacaaaccaggagagacccaagtgatttcatatgaaatgcttcatgtcacacctccaatgagcccaccagatgtcctcaagaccagtcctgtggctgatgctgctggttgggtggatgtggataaagaaactctgcaacacaggaggtacccaaatgtgtttgggattggggactgcaccaaccttcctacgtcaaagaccgctgctgcagtagctgcccagtcaggaatacttgataggacaatttctgtaattatgaagaatcaaacaccaacaaagaagtatgatggctacacatcatgtccactggtgaccggctacaaccgtgtgattcttgctgagtttgactacaaagcagagccgctagaaaccttcccctttgatcaaagcaaagagcgcctttccatgtatctcatgaaagctgacctgatgcctttcctgtattggaatatgatgctaaggggttactggggaggaccagcgtttctgcgcaagttgtttcatctaggtatgagttaaggatggctcagcacttgctcatcttggatggcttctgggccaaaactgcagtcactgaatgaccaagagcagcacgaaggacttggaacctatccttgtaaagagttccttgatgggtaatggtgaccaaatgcctcccttttcagtacctttgaacagcaaccatgtgggctactcatgatgggcttgattctttgggaataataaaatgaaataatacttttattttctgaataaaaaaaaaaaa

SEQ ID NO: 498 - DNA, 1084 bp, Homo sapiens
  misc_feature: Incyte ID No: 987498.2
  unsure 517, 533: a, t, c, g, or other
ggcgtgagtgaccatgcctagctcacttccaggtttaacagacaaaataaacttactctagtttccatctctatcattttataataaccgtagcccacattgtagtagtttttcagctctttactaagtcccaccaattcatgttttcacccttaaaatctttctcactgatactctctctggacagaaaaaaggtgaaataagcctactataaggaatatatgacatgctaaattttatttttaaacggttcttcaagtcagattaaagtaataatagcaaattatgtgattatccatgtcccagcctctctccaaaaaaatagtaaacaagatgtcttcttcttttcccaaagatacacatacacacatgtacaaatttttttatcagataataatagctaatatttaatgagtacttaccttagtttgtcccctttacaacagctttacatctgtgtgattgatacagttcatattcccattttataactgagaaaactggtgcacagagaggntaaggcaattgccaangtcacacattaataagtggaaatgctggggtatgaaccaggtagtctgcccccatagctctgccccccagagctgtactgtctcccatgagggtacttctccatggagcagcctgaggcgatccctttattctgggcttctctcagaaatggattcccacacagtattcaaagcaaatttccccagaggaaatcctattggaagaacttaaaaactcagaatctttttctttgtccagagagttgaggaagcttaagctaaatgatacatgtttttaaaaaaaaatcagattataaatttagtttttggtgattcattaaattctttactattatagttattttctagctgttcatcttttagctaaatttgttccaaagaagcaaaagtttggtttctactaagttctggattctggatgggagattgcactgtgtgtgacatgcaagtttcatggtgtgggagattgcagagcatttgggttactgcttttactctttggaagctgttatcatctgtatctgctttaaataaagttaaagatttggaac

SEQ ID NO: 499 - DNA, 642 bp, Homo sapiens
  misc_feature: Incyte ID No: 021902.5
ggcgttaccatcgtccgtgcgcaccgcccggcgtccaggtgagtctcccatctgcagagacgcggacgcgccggcccgcagttggcctgcggagcgcggtggacggtttggcgcccaccaggcgatcaatactttggatttttaatttctagatttggcaattcttcgctgaagtcatcatgagctttttccaactcctgatgaaaaggaaggaactcattcccttggtggtgttcatgactgtggcggcgggtggagcctcatctttcgctgtgtattctctttggaaaaccgatgtgatccttgatcgaaaaaaaaatccagaaccttgggaaactgtggaccctactgtacctcaaaagcttataacaatcaaccaacaatggaaacccattgaagagttgcaaaatgtccaaagggtgaccaaatgacgagccctcgcctctttcttctgaagagtactctataaatctagtggaaacatttctgcacaaactagattctggacaccagtgtgcggaaatgcttctgctacatttttagggtttgtctacatttttgggctctggataaggaattaaggagtgcagcaataactgcatgtctaaagttgtgcttattcttgtaattgaatatgctatg

SEQ ID NO: 500 - DNA, 570 bp, Homo sapiens
  misc_feature: Incyte ID No: 2072479CB1
cgctggcccggcccacccggggcggttgtggtcgctatatataaggtggggaggccgccggcccgttcggttccgggcgttaccatcgtccgtgcgcaccgcccggcgtccagatttggcaattcttcgctgaagtcatcatgagctttttccaactcctgatgaaaaggaaggaactcattcccttggtggtgttcatgactgtggcggcgggtggagcctcatctttcgctgtgtattctctttggaaaaccgatgtgatccttgatcgaaaaaaaaatccagaaccttgggaaactgtggaccctactgtacctcaaaagcttataacaatcaaccaacaatggaaacccattgaagagttgcaaaatgtccaaagggtgaccaaatgacgagccctcgcctctttcttctgaagagtactctataaatctagtggaaacatttctgcacaaactagattctggacaccagtgtgcggaaatgcttctgctacatttttagggtttgtctacattttttgggctctggataaggaattaaaggagtgcagcaataactgcactgtct

SEQ ID NO: 501 - DNA, 4526 bp, Homo sapiens
  misc_feature: Incyte ID No: 331337.3
ggggttcccagctcccgggcgatcctgcccttgccgagcgcgttttctggagtcacctgggggaggggagtcctggagcagtggcctgggctggggaagacgcctggggcactgcccggcgttaacaaagggagccgatacctgacctggctgtggtgctgctgtgagcggtggctggccgccaccgagcgtgctgagcaaccgcagcctccgcggccgagagtgcagcgagcaaggggagagccagttgcgcagagccctgcaaccagcagtccagggagaagtggtgaatgtcatggagcccagctgaaatggactggcccccttgagcctgtcccaagccctggtgccaggtgtccatccccgtgctgagatgagttttgatcatcctgagaaaaatgggccttggcctgcagacccaataaaccttccctcccatggataatagtgctaattcctgaggacctgaagggcctgccgcccctgggggattagccagaagcaggcttgttttcctgctcagaacaaagtgacttccctgaacacatcttcattatgattcacaccaacctgaagaaaaagttcagctgctgcgtcctggtctttcttctgtttgcagtcatctgtgtgtggaaggaaaagaagaaagggagttactatgattcctttaaattgcaaaccaaggaattccaggtgttaaagagtctggggaaattggccatggggtctgattcccagtctgtatcctcaagcagcacccaggacccccacaggggccgccagaccctcggcagtctcagaggcctagccaaggccaaaccagaggcctccttccaggtgtggaacaaggacagctcttccaaaaaccttatccctaggctgcaaaagatctggaagaattacctaagcatgaacaagtacaaagtgtcctacaaggggccaggaccaggcatcaagttcagtgcagaggccctgcgctgccacctccgggaccatgtgaatgtatccatggtagaggtcacagattttcccttcaatacctctgaatgggagggttatctgcccaaggagagcattaggaccaaggctgggccttggggcaggtgtgctgttgtgtcgtcagcgggatctctgaagtcctcccaactaggcagagaaatcgatgatcatgacgcagtcctgaggtttaatggggcacccacagccaacttccaacaagatgtgggcacaaaaactaccattcgcctgatgaactctcagttggttaccacagagaagcgcttcctcaaagacagtttgtacaatgaaggaatcctaattgtatgggacccatctgtataccactcagatatcccaaagtggtaccagaatccggattataatttctttaacaactacaagacttatcgtaagctgcaccccaatcagcccttttacatcctcaagccccagatgccttgggagctatgggacattcttcaagaaatctccccagaagagattcagccaaaccccccatcctctgggatgcttggtatcatcatcatgatgacgctgtgtgaccaggtggatatttatgagttcctcccatccaagcgcaagactgacgtgtgctactactaccagaagttcttcgatagtgcctgcacgatgggtgcctaccacccgctgctctatgagaagaatttggtgaagcatctcaaccagggcacagatgaggacatctacctgcttggaaaagccacactgcctggcttccggaccattcactgctaagcacaggctcctcactcttctccatcaggcattaaatgaatggtctcttggccaccccagcctgggaagaacattttcctgaacaattccagcctgctccttttactctaggggcctctgtcagcaagaccatggggacttcaagagcctgtggtcaggaaatcaggtccagccttccctgtagccagacagtttatgagcccagagcctcctgccacacacatgcacacatatctagcattctttccagacagcatcctccccgccttccaccttggtagatgcaaggtctatctctcccatcagggctgccaaagctgggctttgtttttcccagcagaatgatgccattctcacaaaccaatgctctatattgcttgaagtctgcatctaaatattgatttcacgttttaaagaaattctcttaaattacaattgtgcccaatgcagggtggctctggggggcaagtaggtggtacaggggattggaaacatgctccgcgcctccagagaaaagttgctcccgaggtccatgcccctgggaacgtgttcctatcactctggctggttgggctggtccttagactgggtgcttatgattaaagggtcttggttagcccactttccctctccatgtggagatggaaggtagagaaggatacagtgtctatcctcaagttgctacggttcagtgagagaggcagacatctgaacaggcaggtaggattcagtgtgctcagtgcactggggatttggagagagatgggcttgctctctctgtgcacccaggagggccacgcacttaaaactgtgtttgtggatcagagaaggctttatagcacagggggcattcagatgagtcttagaggaagagaagaaacatggcaagcagattacatctgagccgtttgaattgtgtttttctttcttcccatgtttattttctaagatctacctgaacttagagactcaagatatttttttaggaaacctcctacccatgtctgaggtagcaagtgcagcctcacgacagataccaggcaatccagagccacaaaacgtgattcctccaggctctgcctggcctgaccctgtcctgtcagctgggtttacataccagtcccattcttccttttcaatacctacccccaaatcttctcctaaccaccatctgtttttttttttttaaagcattttttgctttaaaagcatcctgaccccaatttctttgagctcacgggccttttgctgaaggtctctcagggtgtagtggtgtggctctctggacttaacgtcactctcagaggtcagaaccttggagatcagaactgattctcaccaggtgtgagaggtgtggtagcagattgcaatgctctgcacctcttccttgcaagtgagcaacttcaggctctctgggcagaggctggcccactgtagtttgcagacatgctctccagatggttttactaagtcccctctccctgatagggaatcctgctggaccagcgcagccctggtgtggagaggttaaaagacttgcacaggatcaccaagtcatgctgtagagccaggattcctagacccagggctctgcactctcaaggctggccccatgtgctcaaggggatctaatgtttgggctccaaactaaccatctcggagctgggctcctcatttactgccaaaccctcagcttatgtagctagaaagggccctggagtgagaaagcctggattttcaaattgatgctcccctactgactagctgtgccactctgggcaaatgctcttccttgagcctgtttccacacctgtaaagtggggatgatgatcctatctcactgcttttgtgaggattacaggaaagcacctgtcctggctctgtacctggcacgtagtaggtgctcagttcatgctggtttccttcctgcctttagtagggacctgctctgtgctcacacctcggctgcatgcaccctgctgtgacggaggctagtgtggaagaggtcctgtcctcagggaattaactgtcttattgggagacaacaactgtcctccttggaacacccaagaaaccatgcaaagcagtggacaacacagaacacgccctcctcctcgctgcctgcagctccaatctgattctgcttgggaatgggcggagcacgtgggctgcttaactgctgtataggacaagccccttacccctctctgggcccatgaattcctggcttggtttatgttctgatttgacacactgattttaatcttcgaatcatgacactgagtgcagaggaggtggcattccgacagcaggacatacatgttggtgtgaagactgggacgacactgggtagaatctagtttttaattattattaatataaaggatcaaattaatttaaatatgattctgaagtctacagaacttttagttctgtgctgtctatgtggacactttggtaaaatgcaaattatgatatggacgttatcattggtctggtgagatgtttcatatttgtgacagttaatttaaaaattatgacttaatgctgcctgtgtctatggggttctgtcttctttgatagccatctattcatctggatcatgggaccctctctaatccttccaccaatcaaataagctattgctattggtttggagttgagatatcagtctcggaaacttctgaaaaatgctaataattacccaaggattatgtcaaattttaaaataaatgtgtgtgtgtttcttt

SEQ ID NO: 502 - DNA, 2962 bp, Homo sapiens
  misc_feature: Incyte ID No: 237342.25
  unsure 38: a, t, c, g, or other
ggctcccctcgccgtcctggacacggcggagtgcggancagcccgtaagatgctctgacctttgaccctgccgttcagctctagggcccgtgcaggccacaccatgaacacctccccaggcacggtgggcagtgacccggtcatcctggccactgcaggctacgaccacaccgtgcgcttctggcaggcccacagcggcatctgcacccggacggtgcagcaccaggactcccaggtgaatgccttggaggtcacaccggaccgcagcatgattgctgctgcaggtatctgtgatccttgatctctaaactcctgagctctggtgggtcgacctgagcacagccaagcttcagttcagcctgtgtccctaggttaccagcacatccgcatgtatgatctcaactccaataaccctaaccccatcatcagctacgacggcgtcaacaagaacatcgcgtctgtgggcttccacgaagacggccgctggatgtacacgggcggcgaggactgcacagccaggatctgggacctcaggtcccggaacctgcagtgccagcggatcttccaggtgaacgcacccattaactgcgtgtgcctgcacccgaaccaggcagagctcatcgtgggtgaccagagcggggctatccacatctgggacttgaaaacagaccacaacgagcagctgatccctgagcccgaggtctccatcacgtccgcccacatcgatcccgacgccagctacatggcagctgtcaatagcaccggaaactgctatgtctggaatctgacggggggcattggtgacgaggtgacccagctcatccccaagactaagatccctgcccacacgcgctacgccctgcagtgtcgcttcagccccgactccacgctcctcgccacctgctcggctgatcagacgtgcaagatctggaggacgtccaacttctccctgatgacggagctgagcatcaagagcggcaaccccggggagtcctcccgcggctggatgtggggctgcgccttctcgggggactcccagtacatcgtcactgcttcctcggacaacctggcccggctctggtgtgtggagactggagagatcaagagagagtatggcggccaccagaaggctgttgtctgcctggccttcaatgacagtgtgctgggctagcctgtgacccctcgggactgcctggtgcaggtggtggcagctggagggacccatgcagcacccaggtcagagcagaccctcccctgccggcctgcgccagctggacctgatggccccctgtggcgccttgacctgctgggccaggctgccctgggactctcagcccccagttgcttatccagatgtgacagagctcgacccaagccaggctgcacactcctggactgggctagcctgcactgcctgggaaagtcggccgagggcccaaagctgctgaggggtctgaggctggtgcccacccccaagctagtgtgttctctgcccctccctgcccgcgtttcagggcctcggtccatagagaacaccaccaccatggccaggtggaagggtttattagtccctgccagcagctgtcctccctggtgcaggtggcctggccagcccactggattggggacgggccaggctgggccaggtcgggggctcagtctgggaggtaataaaagcagaccgacacgcagatgttgctcgggaagcagatgtcgatgcagagataaatcagccgctgtctccggggcccctctgctcgccgggcccagtagatgggggtcctcatgcacaggcgctgcaccaaagcccccgcctgggcggggtccacttcgaggctcccctgcactgccagcagctcctgggtgtggtgggtgtcctggctggggacccaagcctcttggacctgttgagaaggctcttggaggtatccaccagcagccgcagggtctcccgatcactgtcctccatcaggcggaggaagcagacctggtgctcctcagggcggtaacagatgcagccgctctgcccgtcgaacagcaccgcccagctgtggttgctctgaggtggggtcactgtgatggtcgccgcgttccgggccacgtccaccaggatggtttggttgggccggggcatgtgggggctcgggagggtcattcgcagcgtctgcagccttggcttgggagggccctgagcagagccaagaagccctccagccacaatccccacagcggccagcaccatgcagtcagcagcagcaggagcaggctcacggctctccagcccccgcaggagggcttggtcttcacccctgtaggcccaggtttggggcgctcagcacagcagcttgctggttccatcctgcagcccctgctcacaatgtgccgattgtctgcgtcccttgtctgcagccttggccaggggaaactcagaacagaacccctcccctcctgaccctgcgcctccccctcagctctggatctgatatccaggtcagagccaggacagcccctcctcccacctgggggatgcctgtcaccaggcccggctccagacacctggcctgtgcagactggagctcagggtctgggaggcgtagggctcggccgcgtggaaatccagtccggctgaccgactggagggcagcccaggcccggccagggtgactcgctaagtgtggttggggtggatttcgttttcctaaagtggcctgagtctgtcaggttatccttgactcccagagttgggcacagggcctgacacgccacaagctgtcaatacgtgcctgttcagtgaatgacaggtgtgggactgtgcacccccagccacttcccagcccccgcacacccaagaccagggggttcctgaagcctggaccacaggacaggcagcctgctggagcctgtgcccctgggacagtcaggccagcctcgggggcccggctagcccaactttttttttttt

SEQ ID NO: 503 - DNA, 1114 bp, Homo sapiens
  misc_feature: Incyte ID No: 1097450.22
agtggaggagggagagacgctggcccgggacccgaggggcgtgggcatcgggaggcgggcccgggttaggggcgggaccgccgcctggttaaaggcgcttatttcccaggcagccgctgcagtcgccacacctttgcccctgctgcgatgaccctgtcgccacttctgctgttcctgccaccgctggctggctggctgctggacgtccccacggcggcggtgcaggcgtcccctctgcaagcgttagacttctttgggaatgggccaccagttaactacaagacaggcaatctatacctgcgggggcccctgaagaagtccaatgcaccgcttgtcaatgtgaccctctactatgaagcactgtgcggtggctgccgagccttcctgatccgggagctcttcccaacatggctgttggtcatggagatcctcaatgtcacgctggtgccctacggaaacgcacaggaacaaaatgtcagtggcaggtgggagttcaagtgccagcatggagaagaggagtgcaaattcaacaaggtggaggcctgcgtgttggatgaacttgacatggagctagccttcctgaccattgtctgcatggaagagtttgaggacatggagagaagtctgccactatgcctgcagctctacgccccagggctgtcgccagacactatcatggagtgtgcaatgggggaccgcggcatgcagctcatgcacgccaacgcccagcggacagatgctctccagccaccgcacgagtatgtgccctgggtcaccgtcaatgggaaacccttggaagatcagacccagctccttacccttgtctgccagttgtaccagggcaagaagccggatgtctgcccttcctcaaccagctccctcaggagtgtttgcttcaagtgatggccggtgagctgcggagagctcatggaaggcgagtgggaacccggctgcctgcctttttttctgatccagaccctcggcacctgctacttaccaactggaaaattttatgcatcccatgaagcccagatacacaaaattccaccccatgatcaagaatcctgctccactaagaatggtgctaaagtaaaactagtttaataagcccttc

SEQ ID NO: 504 - DNA, 5450 bp, Homo sapiens
  misc_feature: Incyte ID No: 1100919.2
cttactcatttgtgtttattcttggacttatcctgacataatggggtttttttaattatagattcacactgcatttattcatcacccctgtcctctcatccataactcaaatttactaccagcaacacaaaatacaaagatgtgtccagtttcactacagctcttcgcgtttacaagtgtcgagcgcttgctttcggaacgcccttgtgattggccgagccaatgccagtgacatcaaccaacttacttttgattggaaggctggttgctgggactgtagcgtttgcaggaagtcacttaactgtttgggagctggaaaaccgaagctgaagttctcttttgccataggaacgagcgcaactgactaggaaagatgtgtcccaaagctccgcaagctggaacgtgagccaggaggcccggaccggccacgggaccgcgaggcactccgaaagtgtgcggctgccccttccctgcctcccagctgttacccttttaaatgtcagtgttcgaggctgtaggggtagcacgaggcagcgaaacggaacagtcggattggccgcacgcctcagttctagacgcacctctccaccgaaggccgttctgactggcagggggagaaagtaaacagagttgaatcaccctccccactggccaattggagggggtttggtttgtgacgtgatgggattctgcgaaattgttactgagcaagagaatgccggaacggtgcggaccggccggagcaggggttcagaagccgtcagtggactcgggaaaaagtgtctcttagacctggcgctcggcgggaccctcgccacccgcgtcggggtgatcgggtgaatgtcctggggctttggctcgacggcgaggcggccgagggcgtgcacctctcttgcagtttcctctcgccagcgcctcgggggcgtttttcagtgcgaataaacttgacgatccgccacgtgtggcattctttccaagggagccggctcagaggggccggcgcgcccgtcgggggatcgcggccggcgcggggcaggggcggcggctagaggcggcggcgcggcggagcccggggccgtggatgctgcgtgcggaggcgctgccggttacgtaaagatgaggggctgaggtcgcctcggcgctcctgcgagtcggaagcgccccgcgcccccgcccccttggccgccgcgccgtgccgggcgggcgggtcgtcgtccgaggccagggagggcgagccgaacctccgcagccaccgccaagtttgtccgcgccgcctgggctgccgtcgcccgcaccatgtccgcggccgcctacatggacttcgtggctgcccagtgtctggtttccatttcgaaccgcgctgcggtgccggagcatggggtcgctccggacgccgagcggctgcgactacctgagcgcgaggtgaccaaggagcacggtgacccgggggacacctggaaggattactgcacactggtcaccatcgccaagagcttgttggacctgaacaagtaccgacccatccagaccccctccgtgtgcagcgacagtctggaaagtccagatgaggatatgggatccgacagcgacgtgaccaccgaatctgggtcgagtccttcccacagcccggaggagagacaggatcctggcagcgcgcccagcccgctctccctcctccatcctggagtggctgcgaaggggaaacacgcctccgaaaagaggcacaagtgcccctacagtggctgtgggaaagtctatggaaaatcctcccatctcaaagcccattacagagtgcatacaggtgaacggccctttccctgcacgtggccagactgccttaaaaagttctcccgctcagacgagctgacccgccactaccggacccacactggggaaaagcagttccgctgtccgctgtgtgagaagcgcttcatgaggagtgaccacctcacaaagcacgcccggcggcacaccgagttccaccccagcatgatcaagcgatcgaaaaaggcgctggccaacgctttgtgaggtgctgcccgtggaagccagggagggatggaccccgaaaggacaaaagtactcccaggaaacagacgcgtgaaaactgagccccagaagaggcacacttgacggcacaggaagtcactgctctttggtcaatattctgattttcctctccctgcattgtttttaaaaagcacattgtagcctaagatcaaagtcaacaacactcggtccccttgaagaggcaactctctgaacccgtctctgactgttggagggaaggcaaatgcttttgggttttttgggttttgtttttgtttttttttctccttttatttttttgcgggggagggtagggattgggtgggggggagggggttaaggccaagactggggtagaattttaaagattcaacactggtgtacatatgtccgctgggtgagttgacctgtggcctcgcacagtgattctgggccctttatgcttgctgtctctcagaattgttttcttaccttttaatgtaatgacgagtgtgcttcagtttgtttagcaaaaccactctcttgaatcacgttaacttttgagattaaaaaaaaaaacgccatagcacagctgtctttatgcaagcaagagcacatctactccagcatgatctgtcatctaaagacttgaaaacaaaaaacagttacttatagtcaatgggtaagcagagtctgaatttatactaatcaagacaaacctttgaaaggttacactaagtacagaacttttaaaccttgctttgtatgagttgtactttttgaacataagctgcacttttattttctaatgcagaggatgaataagttaaatacatgctttgaggatagaagcagatgttctgtttggcaccacgttataatctgcttattttacaatatacacgtttccctaagaaatcatggcagagatgtgagggcagaatatacacaacagatgctgaaggagaaggagggtagtgttttgcaaaagaaaaagaaaagaaccaacagaattttaactctattaacttttccaaattttcctatgcttttagttaacatcattattgtatcctaatgccactaggggagagagcttttgactctgttgggttttatttgaatgtgtgcataacagtaatgagatctggaaacacctattttttggggaaaaaggtttgttggtctccttcctgtgttcctacgaaactcccactctcaggtgcaagagttatgtagaaggaaagggagctgaaataggaacagaaaaatcaacccctataactagtgaacaccaagggaaaataccacaatgatttcagaggagactctgcaaaatcgtcccttgtggagaatgcaggcaacatggaatactacgaatgaaatcacatcactgtatcttttacatcaatagcctcaccactaatatatcttgtatctaggtgtctataatggctgaaaccactacatccatctatgccatttacctgaaaacttaactgtggcctttatgaggccagaaaagtgaactgagttttcgtagttaagacctcaaatgaggggagtcagcagtgatcatgggggaaatgtttacattttttttttcttcagaagtaacgctttctgatgattttatctgatatttaaaacagggagctatggtgcactctagtttatacttgcgctctgaaatgtgtaaacatagggtgcctacctatttcacctgacccatactcgtttctgattcagaatcagtgtgggctcctgcagtgggcgcgggtcacggctgactccaacttccaatacaacagccatcactagcacagtgtttttttgtttaaccaacgtagttgtattagtagttctataaagagaactgcttttaacattagggactgggagcagtccatgggataaaaaggaaagtgttttctcacgagaaaacatgtcaggaaaaataaagaacactttctacctctgtttcagatttttgaaacacttattttaaaccaaattttaatttctgtgtccaaaataagttttaaggacatctgttcttccatacgaaataggttaggctgcctatttctcactgagctcatggaatggttctgcttatgatactctgcacgctgccttttagtgagtgaggagtttggggttgcctagcaacttggctaacttgtaaaaagtcatctttccctcacagaaagaaacgaaagaaagcaaagcaaagtcagtgaaagacaatctttatagtttcaggagtaaatctaaatgtggcttttgtcaagcacttagatggatataaatgcagcaacttgttttaaaaaaatgcacaatttacttcccaaaaaagttgttacttgccttttcaagttgttgacaaacacacatttgatattctcttatatgttatagtaatgtaacgtataaactcaagcctttttattctttgtgattaaatcctgttttaaaatgtcacaaaacaggaaccagcattctaattagatttactatatcaagatatggttcaaataggactactagagttcattgaacactaaaactatgaaacaattactttttatattaaaaagaccatggatttaacttatgaaaatccaaatgcaggatagtaatttttgtttacttttttaaccaaactgaatttttgaaagactattgcaggtgtttaaaaagaaagaaaagttgttttatctaatactgtaagtagttgtcatattctggaaaatttaatagttttagagttaagatatctcctctctttggttagggaagaagaaagcccttcaccattgtggaatgatgccctggctttaaggtttagctccacatcatgcttctcttgagaattctatttggtagttacaattacagaaactgattagtttgtcagtttgcagatagatttagcacagtactcatcactcggatagattgagatgttctttcacatcagatgatctgtaacactgtaagatactgatctttacaactgtttaatcagttttatttttgtacagtattagtgacctaagttattttgctgtcccgtttttgtaaatcaaatgaaattataaaagaggattctgacagtaggtattttgtacatatgtatatactatgttagagatctaagttctctgcttttaaggcatttatgttcttctagtattttctttcatggatgatgtgaaagtaaatttaaactggctttaaaaaatgctaaccagtttttccaatatcatttatgagcaactcttatgttttctaatattttatgattttctctttttatacttccagcttttctattatatgatttttctggattatttgattatttctaggagcaatctgtttctacgccattatcgcactgtgatagcttttgtggc

SEQ ID NO: 505 - DNA, 1790 bp, Homo sapiens
  misc_feature: Incyte ID No: 236196.3
agattattaaaaatttgagttacaaaaagactacaaagaagactacacataatttaagcccttttaaaaagtttcacttagatttaaaggtcaaggcatttgaacacttcagtaaaacatagtcattttttataatgttttaatttgccatgaacttattttatatttatttatgtatttatttttattagaccgagtctcactctagcctgggcaacggtgagaccctgcctcaaaaaaaataaaaataaaaataaaacaccttaattagaatctatttttacctattttctaaatttatttaaatgcttagcaggaagcataaggaaaagccatcggcctccaatacccatgatgacagagggagcacttgagccttgccttccctcctcttaaatcagggtgtgttccgagattacagaacatcacaccttggcgtgatgaaatcatgccaagattctgactctccctttccggtgatactgctcatgatttctcctaatacgcttcaagcaactgttaccacaaaaaatacagtttccgcagggctttaaaggattgagtttagcatgtatatcatgcgttattaaagttcacgtgattcatgtgaaattaactgtcctttttgctagtgccaaaacagtgccttctctgcacactttacttgtttataaagttctcccacatgtccttaaatatcaagggggaaagtatggatattcgcgtagcaataatgccagcaaaggtcattttcattttttagtcatatagatatgaaaataagttcatatagatatgaaattgcttgactttattgttttggggagattttttttccttacatgattatattaaacactttaaaatagccttccggtttctggattttgagaagcctgatctgttattgttgtggttgttggtgtttgtaatattcattattgtttgtatatacacggtttagtcttactgatttcaaatgcattttgttattgctcaacccaactggtaacactgtttgctgggagcattatacttaactttgattcaccatggttgatgccactgccatgatcgctgggtcttaaagagctttccctagccactgacagccccgtggagatcataatcagggccccaggctggttccaggatcaggcagcctatagagtgtgagcatctatgtgtagctacccttgttgggtgggctcttagactgatggggtaggatatgaagtgaaagacttcaaatgcaagtaaggtagtttgggctccttaattccaaacatcccatgagtatatcaagatgaataaggaccaagggacctctgtgactcatagaagggctggctgaatcctgaagtagcatagtgggacctggtctacaatttatgcacatgcactgacagccttgctgtgccacgtgtctcaccaagacccagttgggaaagagcgtcatattgccaacaggttgggtttctctggcctacacctgattaatgggccctttatctttggtgtcccctaggagtgtccagttgttttattgctgtattttgttattgcagtacttaataaaaattgttgatagggcccaaaaccctacagaaattctatgtctgtaaaaaccaacaaaggcattggacttgtgtgaatgtacagggtttttttagtagtaattttaaatttaaatgttttaagtgatcatcagtgttcctttttacttataaagttggattcttttttagaatttgtaataaataaaaactgctgctttaccactgtaaaaa

SEQ ID NO: 506 - DNA, 1651 bp, Homo sapiens
  misc_feature: Incyte ID No: 403121.11
tgtaagattcaaccgaaaaggctgttgagcgagcttttcctttctgaacacccgctggctgtgtctcgggcgccgatttccctgtaagagccggcggtgaaggaggaaggggtttggggtggggccgaggctggcggagcgcggcactgagagggcccctgggcggcaggcgagaccgcggacaccctcctggcgctgcgctactgtaaggaccgcggcgctctcaccgtgggcgtcaccaacaccgtgggcagctccatctctcgcgagaccgactgcggcgtccacatcaacgcagggccggagatcggcgtggccagcaccaaggcttataccagtcagttcatctctctggtgatgtttggtttgatgatgtctgaagaccgaatttcactacaaaacaggaggcaagagatcatccgtggcttgagatctttacctgagctgatcaaggaagtgctgtctctggaggagaagatccacgacttggccctggagctctacacgcagagatcgctgctggtgatggggcggggctacaactatgccacctgcctggaaggagccctgaaaattaaagagataacctacatgcactcagaaggcatcctggctggggagctgaagcacgggcccctggcactgattgacaagcagatgcccgtcatcatggtcattatgaaggatccttgcttcgccaaatgccagaacgccctgcagcaagtcacggcccgccaggttgacttccccagaaatctggccaagtctgtaactgtggaatgaggctgagaccgtgacaagaccatcaccacctttcatctgattccagacctgtcccaacagcagggatgctacatgggaagagaagtggacatcccacatgttctgcgtgctcctgtagagcttgacagcttccacgtgccttctacccaagtgcttttgcttacagcagatactgtttctctgtgtcctgaagtcgccagaggagaagggaatcattgtttacacatggggatcagagcagacttctccactactgtgcaatagagatacagctctcttcagagtaactgtgaaccttttataaccaacactagagttagttttaaaagacaagatatttataatgacgactgtatagcttttaagttatttttctagtatgtggctttctgtagccgtggtaacggccaaactgttcatcctagctacccatgctctgtgtccaggcttgctcctggcaggtggcattcatctcagatgtgagcacaaggcattggccctctggactcctttctccttttctttcctctctaggctgctcctgaatcctgttctctgacatccgtggagcccctcctgcatccacctatgcctcctataagtccagttgaaatctcagcctccttcaacattttcttctcgtgtgtggcccacatccctccacttctccaacttctgtttaatctgatcacggctctttttaagccctggcagcattttggtccctgctccttgcccatagtaaaacagcttgaaatatcccatgcaagagagtagtttcaagtgggcaactctgctctctatttaaaagcgtgcacaatcaaaagtactatgcaattttaggacaataaagaacatacagtttaaa

SEQ ID NO: 507 - DNA, 9016 bp, Homo sapiens
  misc_feature: Incyte ID No: 346570.3
  unsure 4398: a, t, c, g, or other
gaattcgcggccgcgtcgaccggcgctgctggaagatggcgagcggccgggacgagcggccgcattgcgtagggcggctcctgttgctcatgtgcctgctgctgctggggagctcggcccgggcggctcacatcaagaaggcggaggcgactaccacaactacgagcgcgggcgcgaggggccgagggcagttcgaccgctactaccacgaagaggagttggagtcggcgctgagggaggcggcggccgcgggcctccccggcctggcccgcctctttagcatcggccgctcggtggaaggccggccgctgtgggtgcttcgcctcaccgccggcctggggtcgctaatccctgagggcgacgcggggcctgacgctgccgggcccgacgctgcggggccgctgctgcccggccggccccaggtgaagctggtgggcaacatgcatggcgacgagaccgtgtcgcgccaggtgttgatctacttggcccgcgagctggcggcgctaccgcccggggacccgcgcctggtccgcctgctcaacaccaccgacgtgtacctgctgcccagcctcaaccccgatggcttcgagcgtgcccgcgagggcgactgtggcttcggcgacggcggcccgtccggggccagcggccgcgacaatagtcgcggccgcgacctcaaccgaagctttcccgaccagtttagcaccggcgaaccccccgccctggacgaggtgcccgaggtgcgcgccctcatcgagtggatccgcaggaacaagtttgtgctttctggaaatctgcatggtggctcagtggtagcaagctatccttttgatgattctccagaacataaggccactggaatctatagcaaaacctcagatgatgaagtatttaaatacttggcaaaagcttatgcttcaaaccaccccataatgaaaactggtgagcctcattgtccaggagatgaagacgagactttcaaagatggaatcacaaacggcgcacattggtatgatgtggaaggtggtatgcaagattacaattatgtgtgggccaactgttttgagatcacattagaactgtcttgttgcaagtacccacctgcttcacagcttcgacaggaatgggagaacaatcgtgagtctttgatcacattgattgaaaaggttcacattggagtgaaaggatttgttaaagattccataacaggatctgggttagagaatgcaaccatctcagtggctggtattaatcataatatcacaacaggcagatttggtgatttctaccgattacttgttcctggaacttacaaccttacagtagttttaactgggtatatgccattgactgttactaatgtagtggtgaaagaaggaccagccacagaggtggatttttctcttaggccaactgtaacttcagtaatccctgacacgacagaggctgtatcaactgctagcacagttgctatacctaatattctttctggaacatcatcctcctaccagccaattcagccaaaggactttcaccaccaccatttccctgatatggaaatcttcttgagaaggtttgccaatgaatatcctaacattacccggctttattccttgggaaaatcagtagagtcaagagaactttatgtgatggagatatctgataatccgggtgtccatgaaccaggtgaaccagaatttaagtacattggaaatatgcatggaaatgaagtggttggaagagaactgctgttgaacctcatagaatacctttgtaagaactttggaacagaccctgaagtcacagatttggttcataacactagaattcaccttatgccatccatgaatcctgatgggtatgaaaagtcccaggaaggagattcaataagtgtaattggcagaaacaacagcaacaactttgacctgaaccgaaatttcccagaccagtttgttcagatcacagatcctacgcaaccagaaactattgctgtaatgagctggatgaagtcctatccatttgtactttcagcaaacctgcatggaggttctttggtggttaactacccttttgatgatgatgaacaaggacttgccacatatagtaaatcaccagatgatgctgtgttccaacaaatagcactttcttattccaaggaaaattcccagatgtttcaaggtagaccttgcaagaatatgtatcctaatgaatattttcctcatggaataacaaatggagctagttggtataatgtgccaggaggaatgcaggactggaactatttacaaacaaattgctttgaagtgactattgaactaggttgtgtgaaatatccacttgagaaagagctgccaaacttttgggaacagaatcgaagatcactaatccagtttatgaaacaggttcatcagggcgtcagaggatttgttctagatgccacagatggcaggggtatattaaatgccaccattagtgttgctgagattaatcacccagtgactacttacaaaactggagattactggcgtctcttggttccaggaacttataaaatcacagcatctgctcgagggtataatccagttaccaagaatgtgactgtcaagagtgaaggcgctattcaggtcaacttcacacttgttcgatcctcaacagattcaaacaatgaatcaaagaaaggaaaaggggctagcagcagcaccaatgatgccagtgatccaactactaaagagtttgaaactttaattaaagacctttcagcggagaatggtttggaaagcctcatgttacgctcctcctcaaatctggctctggctctttatcgataccattcctacaaagacttatcagagtttctgagaggacttgtaatgaactatccacatattacaaatcttaccaatttgggacagagcactgaatatcgtcacatttggtcccttgaaatctccaataagcccaatgtatctgagcctgaagaaccaaagattcgttttgttgctggtatccatggaaatgcgccagttggaactgaactgcttttggctctggcagaatttctctgcctgaactacaaaaagaacccagctgttacccaattggttgacaggactaggattgtgattgtcccttctctaaatccagatgggcgagagagagctcaagagaaagactgtacttcaaaaataggacaaacaaatgctcgtggcaaagatttggatacagacttcacaaataatgcctcccaacctgagaccaaagccatcattgaaaatttgattcaaaaacaggactttagtctttctgttgccttagatggtggttccatgctggtcacatatccttatgacaagccagtacagacagtggaaaataaagagactctgaagcatttggcatctctttatgcaaataatcatccatccatgcacatgggtcagcccagttgcccaaataaatcagatgagaatattccaggaggagtaatgcgtggagcagaatggcatagtcacctgggcagcatgaaggattatagtgtcacctatggccattgtccggaaatcacagtatacacaagctgctgttactttcctagtgctgcacgactcccttccttgtgggcagacaataagagatctcttcttagtatgttagtggaggttcacaagggagttcatggatttgttaaagataagactggaaagccaatctctaaagcagtcattgtacttaatgaaggaataaaggtacaaacaaaagagggaggttatttccatgtactcttagcgccaggtgtccataacattattgccatcgctgatgggtaccagcaacaacattcacaggtctttgtgcatcatgatgcagctagttctgtggtgatagtctttgacacagataaccggatatttggtttgccaagggagcttgtggtaactgtatcaggtgctactatgtcggcattgatcctaacagcttgcattatttggtgcatctgctcaatcaagtctaatagacacaaggatggctttcatcggctcaggcagcatcatgatgagtatgaagatgaaattcgcatgatgtctaccggctccaagaagtccctcctaagccatgagttccaggatgaaacagacactgaagaggaaacattatattctagcaaacattgaaaaacacattttgcatatctcccagcataagtaccaagcaaaattacagttcctcttgggagaacactgcattaagaagagagactctcttgcttcttcaaagagctttgggaaattaaattgctaaatttgtattctctgtgaatttcactggcagttttgaacttcccttccttaaagtactctaaacctttaaaaaaaaaatctgatttatgcagcagagatgggncagccactttttctttttaatttaagatgagctatttggagcttatgtaataatggcataaagccaactagaggatgttgtattttgcacatcagatgtttactagtggctttagtatttttctttgttttaaatggccaaaagaatccagaaacattaaggcagggacagcagtcagaatcgacataaagctttaaaaactcaaggttttttcaacctactgaggagtacttttctctagttgttaaatagctggagtttttcttattcaggtttaatggaggttgaattgatttttaaacacatataacagtaggaaatgaataaatgggcttctgcatttggctttctacctgttccaaggctagatcggaactggtagactacgctgtaagcaggatttcactacctctcttaaggtttagcaaacttctaaatagcccattttaagggagaacttactaactttattgtgaaaggtctaaatgcccacttgaatgaagctgagagagagatctagcaaaagctaaaactcatgttgtctatctttgaacttggtaaaaacccacaggtgctgctgcttatatctgtgaagcactagcttattctaggaatgcctgattctttaatattgcctaaatcggaacctttttctatgttgcacacatggttttcagatgacccagccatctacaagatctgaattctactgaaaatatctagaaatgtggaagagacctacttgcacattcttaacctgtatttgaacacaaaatatctatacttcatgctccagcccaagcctataccctgtaatagcatactattattgaaatcgcttgaccggtcttgttcacataggcctctgggagtgatttggttctttgccctaatgtttcatttgacggtctctttttgatcaaccaatttttctaaaagttcagtcgaaagcttttaagtatagcttcctcccttgaaaaaaaatgtaaactatgactgctgagtgataaaacactgtggtgtgaaagtgtcatcttcactgccaatcaggcaaagaccggaaagatttgcattttattatgtctgtcttatcatgcaatggaaatgatgctttttgtaagtatgcatcttaccaatgatgtaacggtttaatacctttgaatgttttaataaccaagttgctgctgaacttatactaaatcaggggaccaaaaaacttgctcttatcttctcaaattgtattctatatccattaatgtatcagttatcccaaagccttcaggtggaggggtttaccaccttcctaggtcgttcaaccaggttttgtgaggaatgcattcaaagtggctttataaaagaagattttctttagcaagaataatgaggtcatgtcatttgttaataagtatctgtgataaatccgtggttcaaggttaagccattctggtattctggtattagcaactgtaaattctgccacctcatacatggaacagagcttgtgggatgctaatagttagtgaagtatacatgatttaatttctaataatctttatgttttctttaaggatggtggtgtattgctctttttcagctttatttttaagagtacagtcaggaaaccaacaaggggcctaagagtggctgcccctgcttgggacattacagcaagtgaaacaaagttaatgtgacaagctttgctttgttatcattggtcttcactagaggataccttttacatgtacttctctcttggatcaaatatgtctttaactgtacatctcagtggctggaggccatgccttttaagcatgtgtaaaatttttaaagaaatgaacatacacatagttattttagtaatatttcctgaaagaaaaaccaaattctgctataagtcttgatcttcaatgaacttttaaataatgcatttagctggaaaacaagactttcccagcttgtattacctagaagcgtgaatgtataggatacctgactactaagactatattctcagccctgccctgtcttttatttgcgggtctaatctaatattagaatatattaaccgcttaaggcattgaagccatatgggatggggaatgcatttcttcagtgtttctccgagagactttccatttccttggagttatggcggcaagtaagtatcatagtattaagaaatttgcctaaatctgagttgtgcctttctttactcacaaggcatgggctttgtcctggtgatcagtttgtaagccttcttccttcccagctccttaataaaagcaaagtgattgagtaggtaatgttcaaagtgtctgcctgtgtacatgtacttgtattgattatgtagttcagtaagatgtgcccaagtcatttcagaaagaaagacccttcagttttgatgcattttgctgaacacttgggtagtgagtgggatcctatccagttgaggaatgcttgcaatgctcattgaagggatttgctttgggactttgtcatcttccagaaaggaaacatattgtatatttggcccagtgtgattgattgctttatctttggtaacttttacttgaatgggatttgctgaattaatgactattgaatttaaaactaattatgagttgacaaataaataaaaggtagtgtttatgtctgagcttattgtgtttgagctaacaccaggttactcagtaaccatgacctgctcctccatttccatttattctcaacattaaatagttttatcttgttgttgccagaaatgcacttgtgccaggtattgtccctgctgtatgaaaagcttcttggcaatgaattctgtaatagtgccctacattatggttttctggtggaattgttttaacagtgacaacccaggatttccaatatatttttgttttattgttattaccaaaaattccactatgattgatgttcagtgattttctatagcaacttttttggtaactctttgggtttctgatttgttttagctaaaattttggggatatgatttgggtctttgattaatgtcagctgaacttggatttctagttcatgaagaaatctctcccaatacccatttatcctatttttagcaataattcgttaatgattccacttgattttcagaatattgtcctggttgattttgatttgacagcatacattatgaaatttgaaagtaggttaccattttgaggcagttggatataaattatgtaaatatgtatgattatgatttttataaatggcataacatgagtgtactaactaccttctatgctggccatgctacagattttctggaggtatgacaatagtatttttttatgctcagattaaaaatcagcttttcacctctccagtttttccaagtgatactcccagttctagagcaatctacagctgtttatgtgaggtgcccaacacccattcatctcaagtgcttcagtctttggtttatttcatgcactgtgccttcaaaatgaaatttttaaaagggactttaaatgaagttgaatagtagtttttaaaagtcaatttgtaatttatgtgaaatctaactgtaatgaggtcctttctgttttttatatgtaaacagatctactaatcctgtataaaagttattttacgatgtttgtctttctttgtgttttgtctcataatcttttttcagatgcaatatgccggaaaaagttataggtccagtttgaaaattatttagtttttctgcctatgctagtggaaaaatagtaccaggatcagaatacagggtatcacctatggaatgtttctgtatttatgaattgactcaaaagaaagctttgtttctgaaatcgcattatgtagtagccacagttttctgtttgtagctcagctagattgttatatatgttcaatcatttcacaataacaacacaaaactggtcattgaaaggtttttatgtacgcattttaaacttgttcgttaaaaatttggtcctttttccaggtgaggcccagttagaataatgtgtcccggcacttttaggcacagcaaggatgaattcaatatccccttttcacttagcaacaatgtgttacttctaccctaataggaattgggaaagcaaagttgtatgagaaacagactctgctgataaagtactcatagtccagaccagagaaatataaatggaaataggttatatttcaatagtgattggttcatctaaaagtctctgctgtaaaggaaataaagcatagaggtttgagcatggactttggagttggaccaatctgtgactgattcttcgttctgctacttgcttccaatgtgaccttgtacaagtttcttgacattctctgagcctcagtttctctactggttgaataatccttgataggattgcagtggaaaattaaatgaaataatgttagcaaaggtcccaacataatatttgacttggaattgaatgcccatggtaaccagcatcattttccttcatgtgatgtcttcttatgcctttgaaagaaagttactttatcaaatgtataaataaagatctgtttataggtgatctttttaatttagaagaaattctgagacacaaataaaaaaagaatttttattatg

SEQ ID NO: 508 - DNA, 3033 bp, Homo sapiens
  misc_feature: Incyte ID No: 082155CB1
gcagatgctagaacataatgtagcattactttccccagggtttattgttatgtaagttcttgttcagcttcctttgttttctttcacttctgagaatttaactttcgtttctcactcagctcctgtggggaaactcatttgtggagaccagccctctggcttggtgagtgaatctggtttacaccggctcctgccctgccttcactcttctcccctgattcaagactcctctgctttggactgaagcactgcaggagtttgtgaccaagaacttcaagagtcaagacagaaggaagccaagggagcagtgcaatggatttctcagtaaaggtagacatagagaaggaggtgacctgccccatctgcctggagctcctgacagaacctctgagcctagattgtggccacagcttctgccaagcctgcatcactgcaaagatcaaggagtcagtgatcatctcaagaggggaaagcagctgtcctgtgtgtcagaccagattccagcctgggaacctccgacctaatcggcatctggccaacatagttgagagagtcaaagaggtcaagatgagcccacaggaggggcagaagagagatgtctgtgagcaccatggaaaaaaactccagatcttctgtaaggaggatggaaaagtcatttgctgggtttgtgaactgtctcaggaacaccaaggtcaccaaacattccgcataaacgaggtggtcaaggaatgtcaggaaaagctgcaggtagccctgcagaggctgataaaggaggatcaagaggctgagaagctggaagatgacatcagacaagagagaaccgcctggaagaattatatccagatcgagagacagaagattctgaaagggttcaatgaaatgagagtcatcttggacaatgaggagcagagagagctgcaaaagctggaggaaggtgaggtgaatgtgctggacaacctggcagcagctacagaccagctggtccagcagaggcaggatgccagcacgctcatctcagatctccagcggaggttgacgggatcgtcagtagagatgctgcaggatgtgattgacgtcatgaaaaggagtgaaagctggacattgaagaagccaaaatctgtttccaagaaactaaagagtgtattccgagtaccagatctgagtgggatgctgcaagttcttaaagagctgacagatgtccagtactactgggtggacgtgatgctgaatccaggcagtgccacttcgaatgttgctatttctgtggatcagagacaagtgaaaactgtacgcacctgcacatttaagaattcaaatccatgtgatttttctgcttttggtgtcttcggctgccaatatttctcttcggggaaatattactgggaagtagatgtgtctggaaagattgcctggatcctgggcgtacacagtaaaataagtagtctgaataaaaggaagagctctgggtttgcttttgatccaagtgtaaattattcaaaagtttactccagatatagacctcaatatggctactgggttataggattacagaatacatgtgaatataatgcttttgaggactcctcctcttctgatcccaaggttttgactctctttatggctgtgcctccctgtcgtattggggttttcctagactatgaggcaggcattgtctcatttttcaatgtcacaaaccacggagcactcatctacaagttctctggatgtcgcttttctcgacctgcttatccgtatttcaatccttggaactgcctagtccccatgactgtgtgcccaccgagctcctgagtgttctcattcctttacccacttctgcatagtagcccttgtgctgagactcagattctgcacctgagttcatctctactgagaccatctcttcctttctttccccttcttttacttagaatgtctttgtattcatttgctagggcttccatagcaaagcatcatagattgctgatttaaactgtaattgtattgccgtactgtgggctggaaatcccaaatctagattccagcagagttggttctttctgaggtctgcaaggaagggctctgttccatgcctctctccttggcttgtagaaggcatcttgtccctatgactcttcacattgtctttatgtacatctctgtgcccaagttttccctttttattaagacaccagtcatactggctcagggcccaccgctaatgccttaatgaaatcattttaacattatattctctacaaagaccttatttccaaataagataatatttggaggtattgggaataaaaactccaacatataaatttgaggaaggcacgatttcactcataacaatcttaccctttcttgcaagagatgcttgtacattattttcctaataccttggtttcactagtagtaaacattattattttttttatatttgcaaaggaaacatatctaatccttcctatagaaagaacagtattgctgtaattccttttcttttcttcctcatttcctctgccccttaaaagattgaagaaagagaaacttgtcaactcatatccacgttatctagcaaagtacataagaatctatcactaagtaatgtatccttcagaatgtgttggtttaccagtgacaccccatattcatcacaaaattaaagcaagaagtccatagtaatttatttgctaatagtggatttttaatgctcagagtttctgaggtcaaattttatcttttcacttacaagctctatgatcttaaataatttacttaatgtattttggtgtattttcctcaaattaatattggtgttcaagactatatctaattcctctgatcactttgagaaacaaacttttattaaatgtaaggcacttttctatgaattttaaatataaaaataaatattgttctgattattactgaaaagatgtcagccatttcaatgtcttgggaaacaattttttgtttttgttctgttttctttttgcttcaataaaacaatagctggctctaaaaaaaaaa

SEQ ID NO: 509 - DNA, 1011 bp, Homo sapiens
  misc_feature: Incyte ID No: 370489.47
acacagagagaaaggctaaagttctctggaggatgtgggctgcagagcctgctggctcttggggcactgtggcctgcagcatctctgcacccgcccgctcgcccagccccagcacgcagccctgggagcatgtgaatgccatccaggaggcccggcgtctcctgaacctgagtagagacactgctgctgagatgaatgaaacagtagaagtcatctcagaaatgtttgacctccaggagccgacctgcctacagacccgcctggagctgtacaagcagggcctgcggggcagcctcaccaagctcaagggccccttgaccatgatggccagccactacaagcagcactgccctccaaccccggaaacttcctgtgcaacccagattatcacctttgaaagtttcaaagagaacctgaaggactttctgcttgtcatcccctttgactgctgggagccagtccaggagtgagaccggccagatgaggctggccaagccggggagctgctctctcatgaaacaagagctagaaactcaggatggtcatcttggagggaccaaggggtgggccacagccatggtgggagtggcctggacctgccctgggccacactgaccctgatacaggcatggcagaagaatgggaatattttatactgacagaaatcagcggacgcgtgggtcgtgctctatataatcagtattaatctaaagaccataatcctagtatgaaaaaaataacaagctttgacacaaaatctaagcatctgctttcctggcactcttaagttagacaagagtaaatatgttagcctctcaattctgcctcttcatctttcatctatacttagatttttctttatctttggacttctttggacttctgcttcggtctctctttttactcctttctctttcataaagatctgtttggtattttgatttatgactattactataatggccatccctctctcgagatcggctacgacttcggttctgagttcggtct

SEQ ID NO: 510 - DNA, 2062 bp, Homo sapiens
  misc_feature: Incyte ID No: 2900717CB1
gagtctctgaagccacagatctcttaagaactttctgtctccaaaccgtggctgctcgataaatcagacagaacagttaatcctcaatttaagcctgatctaacccctagaaacagatatagaacaatggaagtgacaacaagattgacatggaatgatgaaaatcatctgcgcaagctgcttggaaatgtttctttgagtcttctctataagtctagtgttcatggaggtagcattgaagatatggttgaaagatgcagccgtcagggatgtactataacaatggcttacattgattacaatatgattgtagcctttatgcttggaaattatattaatttacgtgaaagttctacagagccaaatgattccctatggttttcacttcaaaagaaaaatgacaccactgaaatagaaactttactcttaaatacagcaccaaaaattattgatgagcaactggtgtgtcgtttatcgaaaacggatattttcattatatgtcgagataataaaatttatctagataaaatgataacaagaaacttgaaactaaggttttatggccaccgtcagtatttggaatgtgaagtttttcgagttgaaggaattaaggataacctagacgacataaagaggataattaaagccagagagcacagaaataggcttctagcagacatcagagactataggccctatgcagacttggtttcagaaattcgtattcttttggtgggtccagttgggtctggaaagtccagttttttcaattcagtcaagtctatttttcatggccatgtgactggccaagccgtagtggggtctgataccaccagcataaccgagcggtataggatatattctgttaaagatggaaaaaatggaaaatctctgccatttatgttgtgtgacactatggggctagatggggcagaaggagcaggactgtgcatggatgacattccccacatcttaaaaggttgtatgccagacagatatcagtttaattcccgtaaaccaattacacctgagcattctacttttatcacctctccatctctgaaggacaggattcactgtgtggcttatgtcttagacatcaactctattgacaatctctactctaaaatgttggcaaaagtgaagcaagttcacaaagaagtattaaactgtggtatagcatatgtggccttgcttactaaagtggatgattgcagtgaggttcttcaagacaactttttaaacatgagtagatctatgacttctcaaagccgggtcatgaatgtccataaaatgctaggcattcctatttccaatattttgatggttggaaattatgcttcagatttggaactggaccccatgaaggatattctcatcctctctgcactgaggcagatgctgcgggctgcagatgattttttagaagatttgcctcttgaggaaactggtgcaattgagagagcgttacagccctgcatttgagataagttgccttgattctgacatttggcccagcctgtactggtgtgccgcaatgagagtcaatctctattgacagcctgcttcagattttgcttttgttcgttttgccttctgtccttggaacagtcatatctcaagttcaaaggccaaaacctgagaagcggtgggctaagataggtcctactgcaaaccacccctccatatttccgtaccatttacaattcagtttctgtgacatctttttaaaccactggaggaaaaatgagatattctctgagatattctctaatttattcttctataacactctatatagagctatgtgagtactaatcacattgaataatagttataaaattattgtatagacatctgcttcttaaacagattgtgagttctttgagaaacagcgtggattttacttatctgtgtattcacagagcttagcacagtgcctggtaatgagcaagcatacttgccattacttttccttcccactctctccaacatcacattcactttaaatttttctgtatatagaaaggaaaactagcctgggcaacatgatgaaacccct

SEQ ID NO: 511 - DNA, 2318 bp, Homo sapiens
  misc_feature: Incyte ID No: 442744.17
ctctgaagccattacaaaggttgcttaacttctaattatttgatcactgaggaaaatccagaaagctacacaacactgaaggggtgaaataaaagtccagcgatccagcgaaagaaaagagaagtgacagaaacaactttacctggactgaagataaaagcacagacaagagaacaatgccctggacatggctccagagatccacatgacaggcccaatgtgcctcattgagaacactaatggggaactggtggcgaatccagaagctctgaaaatcctgtctgccattacacagcctgtggtggtggtggcaattgtgggcctctaccgcacaggaaaatcctacctgatgaacaagctggctggaaagaaaaagggcttctctctgggctccacggtgcagtctcacactaaaggaatctggatgtggtgtgtgccccaccccaagaagccaggccacatcctagttctgctggacaccgagggtctgggagatgtagagaagggtgacaaccagaatgactcctggatcttcgccctggccgtcctcctgagcagcaccttcgtgtacaatagcataggaaccatcaaccagcaggctatggaccaactgtactatgtgacagagctgacacatagaatccgatcaaaatcctcacctgatgagaatgagaatgaggttgaggattcagctgactttgtgagcttcttcccagactttgtgtggacactgagagatttctccctggacttggaagcagatggacaacccctcacaccagatgagtacctgacatactccctgaagctgaagaaaggtaccagtcaaaaagatgaaacttttaacctgcccagactctgtatccggaaattcttcccaaagaaaaaatgctttgtctttgatcggcccgttcaccgcaggaagcttgcccagcttgagaaactacaagatgaagagctgaaccctgatttcatagaacaagttgcagaattttgttcctacatcctcagccattccaatgtcaagactctttcaggtggcattgcagtcaatgggcctcgtctagagagcctggtgctgacctacgtcaatgccatcggcagtggggatctaccctgcatggagaacgcagtcctggccttggcccagatagagaactcagccgcagtggaaaaggctattgcccactatgaacagcagatgggccagaaggtgcagctgcccacggaaaccctccaggagctgctggacctgcacagggacagtgagagagaggccattgaagtcttcatgaagaactctttcaaggatgtggaccaaatgttccagaggaaattaggggcccagttggaagcaaggcgagatgacttttgtaagcagaattccaaagcatcatcagattgttgcatggctttacttcaggatatatttggccctttagaagaagatgtcaagcagggaacattttctaaaccaggaggttaccgtctctttactcagaagctgcaggagctgaagaataagtactaccaggtgccaaggaaggggatacaggccaaagaggtgctgaaaaaatatttggagtccaaggaggatgtggctgatgcacttctacagactgatcagtcactctcagaaaaggaaaaagcgattgaagtggaacgtataaaggctgaatctgcagaagctgcaaagaaaatgttggaggaaatacaaaagaagaatgaggagatgatggaacagaaagagaagagttatcaggaacatgtgaaacaattgactgagaagatggagagggacagggcccagttaatggcagagcaagagaagaccctcgctcttaaacttcaggaacaggaacgccttctcaaggagggattcgagaatgagagcaagagacttcaaaaagacatatgggatatccagatgagaagcaaatcattggagccaatatgtaacatactctaaaagtccaaggagcaaaatttgcctgtccagctccctctccccaagaaacaacatgaatgagcaacttcagagtgtcaaacaactgccattaaacttaactcaaaatcatgatgcatgcatttttgttgaaccataaagtttgcaaagtaaaggttgcacaccgatgctccagaattgtgagggagccatactctacagctattccaccgaggataatactaccattgtaaaggcatctcacgggaaaacaacacagctaccatgaaccagcaccatgatctctggatgaaatgctggaagcttctgcagtgtcagctatgagtaaatggatgccaccaccttcacattt

SEQ ID NO: 512 - DNA, 3024 bp, Homo sapiens
  misc_feature: Incyte ID No: 444850.9
ggctctgaagccattacaaaggttgcttaacttctaattatttgatcactgaggaaaatccagaaagctacacaacactgaaggggtgaaataaaagtccagcgatccagcgaaagaaaagagaagtgacagaaacaactttacctggactgaagataaaagcacagacaagagaacaatgccctggacatggctccagagatccacatgacaggcccaatgtgcctcattgagaacactaatggggaactggtggcgaatccagaagctctgaaaatcctgtctgccattacacagcctgtggtggtggtggcaattgtgggcctctaccgcacaggaaaatcctacctgatgaacaagctagctgggaagaataagggcttctctctgggctccacagtgaaatctcacaccaaaggaatctggatgtggtgtgtgcctcaccccaaaaagccagaacacaccttagtcctgcttgacactgagggcctgggagatgtaaagaagggtgacaaccagaatgactcctggatcttcaccctggccgtcctcctgagcagcactctcgtgtacaatagcatgggaaccatcaaccagcaggctatggaccaactgtactatgtgacagagctgacacatcgaatccgatcaaaatcctcacctgatgagaatgagaatgaggattcagctgactttgtgagcttcttcccagattttgtgtggacactgagagatttctccctggacttggaagcagatggacaacccctcacaccagatgagtacctggagtattccctgaagctaacgcaaggtaccagtcaaaaagataaaaattttaatctgccccaactctgtatctggaagttcttcccaaagaaaaaatgttttgtcttcgatctgcccattcaccgcaggaagcttgcccagcttgagaaactacaagatgaagagctggaccctgaatttgtgcaacaagtagcagacttctgttcctacatctttagcaattccaaaactaaaactctttcaggaggcatcaaggtcaatgggcctcgtctagagagcctagtgctgacctatatcaatgctatcagcagaggggatctgccctgcatggagaacgcagtcctggccttggcccagatagagaactcagccgcagtgcaaaaggctattgcccactatgaccagcagatgggccagaaggtgcagctgcccgcagaaaccctccaggagctgctggacctgcacagggttagtgagagggaggccactgaagtctatatgaagaactctttcaaggatgtggaccatctgtttcaaaagaaattagcggcccagctagacaaaaagcgggatgacttttgtaaacagaatcaagaagcatcatcagatcgttgctcagctttacttcaggtcattttcagtcctctagaagaagaagtgaaggcgggaatttattcgaaaccagggggctattgtctctttattcagaagctacaagacctggagaaaaagtactatgaggaaccaaggaaggggatacaggctgaagagattctgcagacatacttgaaatccaaggagtctgtgaccgatgcaattctacagacagaccagattctcacagaaaaggaaaaggagattgaagtggaatgtgtaaaagctgaatctgcacaggcttcagcaaaaatggtggaggaaatgcaaataaagtatcagcagatgatggaagagaaagagaagagttatcaagaacatgtgaaacaattgactgagaagatggagagggagagggcccagttgctggaagagcaagagaagaccctcactagtaaacttcaggaacaggcccgagtactaaaggagagatgccaaggtgaaagtacccaacttcaaaatgagatacaaaagctacagaagaccctgaaaaaaaaaaccaagagatatatgtcgcataagctaaagatctaaacaacagagcttttctgtcatcctaacccaaggcataactgaaacaattttagaatttggaacaagtgtcactatatttgataataattagatcttgcatcataacactaaaagtttacaagaacatgcagttcaatgatcaaaatcatgttttttccttaaaaagattgtaaattgtgcaacaaagatgcatttacctctgtaccaacagaggagggatcatgagttgccaccactcagaagtttattcttccagacgaccagtggatactaaggaaagtcttaggtaaaaatcttgggacatatttgggcactggtttggccaagtgtacaatgggtcccaatatcagaaacaaccatcctagcttcctagggaagacagtgtacagttctccattatatcaaggctacaaggtctatgagcaataatgtgatttctggacattgcccatggataattctcactgatggatctcaagctaaagcaaaccatcttatacagagatctagaatcttatattttccataggaaggtaaagaaatcattagcaagagtaggaattgaatcataaacaaattggctaatgaagaaatcttttctttcttgttcaattcatctagattataaccttaatgtgacacctgagacctttagacagttgaccctgaattaaatagtcacatggtaacaattatgcactgtgtaattttagtaatgtataacatgcaatgatgcactttaactgaagatagagactatgttagaaaattgaactaatttaattatttgattgttttaatcctaaagcataagttagtcttttcctgattcttaaaggtcatacttgaaatcctgccaattttccccaaagggaatatggaatttttttgactttcttttgagcaataaaataattgtcttgccattacttagtatatgtagacttcatcccaattgtcaaacatcctaggtaagtggttgacatttcttacagcaattacagattatttttgaactagaaataaactaaactagaaataaaaaaa

SEQ ID NO: 513 - DNA, 3786 bp, Homo sapiens
  misc_feature: Incyte ID No: 480287.5
  unsure 3163, 3277, 3343, 3488, 3497, 3747, 3774-3775: a, t, c, g, or other
gtactttcagtttcatattactctaaatccattacaaatctgcttagcttctaaatatttcatcaatgaggaaatcccagccctacaacttcggaacagtgaaatattagtccagggatccagtgagagacacagaagtgctagaagccagtgctcgtgaactaaggagaaaaagaacagacaagggaacagcctggacatggcatcagagatccacatgacaggcccaatgtgcctcattgagaacactaatgggcgactgatggcgaatccagaagctctgaagatcctttctgccattacacagcctatggtggtggtggcaattgtgggcctctaccgcacaggcaaatcctacctgatgaacaagctggctggaaagaaaaagggcttctctctgggctccacggtgcagtctcacactaaaggaatctggatgtggtgtgtgccccaccccaagaagccaggccacatcctagttctgctggacaccgagggtctgggagatgtagagaagggtgacaaccagaatgactcctggatcttcgccctggccgtcctcctgagcagcaccttcgtgtacaatagcataggaaccatcaaccagcaggctatggaccaactgtactatgtgacagagctgacacatagaatccgatcaaaatcctcacctgatgagaatgagaatgaggttgaggattcagctgactttgtgagcttcttcccagactttgtgtggacactgagagatttctccctggacttggaagcagatggacaacccctcacaccagatgagtacctgacatactccctgaagctgaagaaaggtaccagtcaaaaagatgaaacttttaacctgcccagactctgtatccggaaattcttcccaaagaaaaaatgctttgtctttgatcggcccgttcaccgcaggaagcttgcccagctcgagaaactacaagatgaagagctggaccccgaatttgtgcaacaagtagcagacttctgttcctacatctttagtaattccaaaactaaaactctttcaggaggcatccaggtcaacgggcctcgtctagagagcctggtgctgacctacgtcaatgccatcagcagtggggatctgccgtgcatggagaacgcagtcctggccttggcccagatagagaactcagctgcagtgcaaaaggctattgcccactatgaacagcagatgggccagaaggtgcagctgcccacagaaagcctccaggagctgctggacctgcacagggacagtgagagagaggccattgaagtcttcatcaggagttccttcaaagatgtggaccatctatttcaaaaggagttagcggcccagctagaaaaaaagcgggatgacttttgtaaacagaatcaggaagcatcatcagatcgttgctcagctttacttcaggtcattttcagtcctctagaagaagaagtgaaggcgggaatttattcgaaaccagggggctatcgtctctttgttcagaagctacaagacctgaagaaaaagtactatgaggaaccgaggaaggggatacaggctgaagagattctgcagacatacttgaaatccaaggagtctatgactgatgcaattctccagacagaccagactctcacagaaaaagaaaaggagattgaagtggaacgtgtgaaagctgagtctgcacaggcttcagcaaaaatgttgcaggaaatgcaaagaaagaatgagcagatgatggaacagaaggagaggagttatcaggaacacttgaaacaactgactgagaagatggagaacgacagggtccagttgctgaaagagcaagagaggaccctcgctcttaaacttcaggaacaggagcaactactaaaagagggatttcaaaaagaaagcagaataatgaaaaatgagatacaggatctccagacgaaaatgagacgacgaaaggcatgtaccataagctaaagaccagagccttcctgtcacccctaaccaaggcataattgaaacaattttagaatttggaacaagcgtcactacatttgataataattagatcttgcatcataacaccaaaagtttataaaggcatgtggtacaatgatcaaaatcatgttttttcttaaaaaaaaaaaaaagactgtaaattgtgcaacaaagatgcatttacctctgtatcaactcaggaaatctcataagctggtaccactcaggagaagtttattcttccagatgaccagcagtagacaaatggatactgagcagagtcttaggtaaaagtcttgggaaatatttgggcattggtctggccaagtctacaatgtcccaatatcaaggacaaccaccctagcttcttagtgaagacaatgtacagttatccattagatcaagactacacggtctatgagcaataatgtgatttctggacattgcccatgtataatcctcactgatgatttcaagctaaagcaaaccaccttatacagagatctagaatctctttatgttctccagaggaaggtggaagaaaccatgggcaggagtaggaattgagtgataaacaattgggctaatgaagaaaacttctcttattgttcagttcatccagattataacttcaatgggacactttagaccattagacaattgacactggattaaacaaattcacataatgccaaatacacaatgtatttatagcaacgtataatttgcaaagatggactttaaaagatgctgtgtaactaaactgaaataattcaattacttattatttagaatgttaaagcttatgatagtcttttctaattcttaacactcatacttgaaatctttctgagtttccccagaagagaatatgggattttttttgacatttttgactcatttaataatgctcttgtgtttacctagtatatgtagactttgtcttatgtgtcaaaagtcctaggaaagtggttgatgtttcttatagcaattaaaaattatttttgaactgaaaatacaatgtatttcactaggcttcttatttctgattttcttttttgcagttatttttatcagaaaataaggttttactctttatagcaatggctggtaatcttttctgtaaaataccagatagtaacgatttatggctttgcaggtcanacagtctctgtctgaattactcagctctgcatgtagtgcaaacgcagccatagaaaatacataaaccaataggtgtggctatgttccaatcaatttttactttcaataacaggntggcacccataagccatagtttgcagaactctgttttacagaaacattggtcagagttttatatanctgcattgtgttactcacatgtataaaaatcatatggattagactatatatattacaatcttgaaaaaactatgcggttattcaaaataacacagtgagaaaaaagcaaggaagcagctaatgccattaaatccacattaataancctgtcttncctaattgctttgaggccttttgttaccttgaactacctgtgatccaatcacacggcaaatgcctcctttcacaatagagcatggtgctgccaagcactgtttcttcacttgaactgaaactttatagaagaccaggtgagaacacagaatactagatgaaatgttcatgtagatatgctttatattttcttccaagctccattgctacaaaggtgtaaataaaatacatttttatgagttgaagtaacntcacagtagaaaagaatgactctgccnntaaaagcaaat

SEQ ID NO: 514 - DNA, 4088 bp, Homo sapiens
  misc_feature: Incyte ID No: 442744.21
  unsure 406-407: a, t, c, g, or other
gtttcatattagtgcatttctttgcagaggttacctctttttcttgtctctcgtcaggtctctgacattgacagagcctggacgttggaggaagccccaggacgttggaggggtaaagtaaaagtccacagttaccgtgagagaaaaaagagggagaaagcagtgcagccaaactcggaagaaaagagaggaggaaaaggactcgactttcacattggaacaaccttctttccagtgctaaaggatctctgatctggcttgttccttgcacacaagggaacaacaccctggacatggctccagagatcaacttgccgggcccaatgagcctcattgataacactaaagggcagctggtggtgaatccagaagctctgaagatcctatctgcaattacgcagcctgnntggtggtggtggcgatttgtgggcctctatcgcacaggcaaatcctacctgatgaacaagctggctgggaagaaaaacggcttctctctaggctccacagtgaagtctcacaccaagggaatctggatgtggtgtgtgcctcatcccaagaagccagaacacaccctagttctgctcgacactgagggcctgggagatatagagaagggtgacaatgagaatgactcctggatctttgccttggccatcctcctgagcagcaccttcgtgtacaatagcatgggaaccatcaaccagcaggccatggaccaacttcactatgtgacagagctgacagatcgaatcaaggcaaactcctcacctggtaacaattctgtagacgactcagctgactttgtgagcttttttccagcatttgtgtggactctcagagatttcaccctggaactggaagtagatggagaacccatcactgctgatgactacttggagctttcgctaaagctaagaaaaggtactgataagaaaagtaaaagctttaatgatcctcggttgtgcatccgaaagttcttccccaagaggaagtgcttcgtcttcgattggcccgctcctaagaagtaccttgctcacctagagcagctaaaggaggaagagctgaaccctgatttcatagaacaagttgcagaattttgttcctacatcctcagccattccaatgtcaagactctttcaggtggcattccagtcaatgggcctcgtctagagagcctggtgctgacctacgtcaatgccatcagcagtggggatctaccctgcatggagaacgcagtcctggccttggcccagatagagaactcagccgcagtggaaaaggctattgcccactatgaacagcagatgggccagaaggtgcagctgcccacggaaaccctccaggagctgctggacctgcacagggacagtgagagagaggccattgaagtcttcatgaagaactctttcaaggatgtggaccaaatgttccagaggaaattaggggcccagttggaagcaaggcgagatgacttttgtaagcagaattccaaagcatcatcagattgttgcatggctttacttcaggatatatttggccctttagaagaagatgtcaagcagggaacattttctaaaccaggaggttaccgtctctttactcagaagctgcaggagctgaagaataagtactaccaggtgccaaggaaggggatacaggccaaagaggtgctgaaaaaatatttggagtccaaggaggatgtggctgatgcacttctacagactgatcagtcactctcagaaaaggaaaaagcgattgaagtggaacgtataaaggctgaatctgcagaagctgcaaagaaaatgttggaggaaatacaaaagaagaatgaggagatgatggaacagaaagagaagagttatcaggaacatgtgaaacaattgactgagaagatggagagggacagggcccagttaatggcagagcaagagaagaccctcgctcttaaacttcaggaacaggaacgccttctcaaggagggattcgagaatgagagcaagagacttcaaaaagacatatgggatatccagatgagaagcaaatcattggagccaatatgtaacatactctaaaagtccaaggagcaaaatttgcctgtccagctccctctccccaagaaacaacatgaatgagcaacttcagagtgtcaaacaactgccattaaacttaactcaaaatcatgatgcatgcatttttgttgaaccataaagtttgcaaagtaaaggttaagtatgaggtcaatgttttacctacagagcaattcaactcatgcttatttatagtactaacttttaatatgatctttaactaaatcctatatttgaaatcatacacaaggactcaagagagatattgtgtaactaggatgcattttccaatgagatatcttgcagtttctgttctgggtagatttttttctctcatatgcaccacccttactgtatattcagtcctatactcttattcagggatttaactatggtcgtagcatagggctgaagtgttgtgaatatgatgaaaatgtgatgagaccaaacaaaccatggggcacagtagagcatcactcctgccaagtggtctttgtatggcatgctggctgcaaataaaggagatctgggacacttaactaggcttttaaagtacagacagtgcacagttctcatttggatggaggctgcatgatctgtgggcactagcagagaaagtggttgcctctgtgcagaatgcatttatgagtagaggctccaccttctctgtccatgtaaaccctctaggtaattactgccccattcccaggccacctagatctctcttctctagtctcccttagtcttttctctttcctgaagtttagaaaataacttctacaatcacagaaaggaaagctttaactcaaactcaaattactttccattcttctgaggaccaggactataatcctataaagcctaaaacttgactgcatttttctctctgctcctctgctatgacattatatcctcaaagctactcagggtaaatgacttactaaaaaaaaaaaaatgacagattgaaaaatcaagaataattcattaatacaaaacattatcctactacaattgtttcaggatgtgtattattcagagttcttcatggcaaataagaatctgctcagcaatttaagtaaaaagtaatttactttttaataccattaggttgcacaccgatgctccagaattgtgagggagccatactctacagctattccaccgaggataatactaccattgtaaaggcatctcacgggaaaacaacacagctaccatgaaccagcaccatgatctctggatgaaatgctggaagcttctgcagtgtcagctatgagtaaatggatgccaccaccttcacattttcagtaaacaaatactcccctaccccatgaaaagttgcatctttgagctgctcacatctccagctaagcctcacaaaagtcaatctgcagggaagaatctaaatcatatgcctacccatgggaaagtctgagaattagagtatttttgtcttctacttttggaggaagaaactaataacgtgggaaattttcctgtatgtttagtcaaccagtttttccatgcagatgtatggagataaatcttatagtaggaataacctaagacttgagttagtatttttgtgtacatcagatacaacactcttctcatcttttttgtcattatttttcaatgttgttttaatctttccactgttgtttcatgtcatgcactttgttaatattctttaagttattcttagtttttaacaatgatacttaagaaagacttaataggactatagaataggtactccctattccccaaccctgggaacacaatataacatattagttcatttgtatttaagatctatcttgtttacacctcagtttagttattgctcttacctttcaaacagttaatattttgtatctagttctgtgaaagcaaaaagcaactttattctttcttacaattccccttttacttaatcggaacatttctttcctgtttgttcattagtcactctcagataaatgaatagtctctttttct

SEQ ID NO: 515 - DNA, 2354 bp, Homo sapiens
  misc_feature: Incyte ID No: 3173735CB1
ttctaaatatttcatcaatgaggaaatcccagccctacaacttcggaacagtgaaatattagtccagggatccagtgagagacacagaagtgctagaagccagtgctcgtgaactaaggagaaaaagaacagacaagggaacagcctggacatggcatcagagatccacatgacaggcccaatgtgcctcattgagaacactaatgggcgactgatggcgaatccagaagctctgaagatcctttctgccattacacagcctatggtggtggtggcaattgtgggcctctaccgcacaggcaaatcctacctgatgaacaagctggctggaaagaaaaagggcttctctctgggctccacggtgcagtctcacactaaaggaatctggatgtggtgtgtgccccaccccaagaagccaggccacatcctagttctgctggacaccgagggtctgggagatgtagagaagggtgacaaccagaatgactcctggatcttcgccctggccgtcctcctgagcagcaccttcgtgtacaatagcataggaaccatcaaccagcaggctatggaccaactgtactatgtgacagagctgacacatagaatccgatcaaaatcctcacctgatgagaatgagaatgaggttgaggattcagctgactttgtgagcttcttcccagactttgtgtggacactgagagatttctccctggacttggaagcagatggacaacccctcacaccagatgagtacctgacatactccctgaagctgaagaaaggtaccagtcaaaaagatgaaacttttaacctgcccagactctgtatccggaaattcttcccaaagaaaaaatgctttgtctttgatcggcccgttcaccgcaggaagcttgcccagctcgagaaactacaagatgaagagctggaccccgaatttgtgcaacaagtagcagacttctgttcctacatctttagtaattccaaaactaaaactctttcaggaggcatccaggtcaacgggcctcgtctagagagcctggtgctgacctacgtcaatgccatcagcagtggggatctgccgtgcatggagaacgcagtcctggccttggcccagatagagaactcagctgcagtgcaaaaggctattgcccactatgaacagcagatgggccagaaggtgcagctgcccacagaaaccctccaggagctgctggacctgcacagggacagtgagagagaggccattgaagtcttcatcaggagttccttcaaagatgtggaccatctatttcaaaaggagttagcggcccagctagaaaaaaagcgggatgacttttgtaaacagaatcaggaagcatcatcagatcgttgctcagctttacttcaggtcattttcagtcctctagaagaagaagtgaaggcgggaatttattcgaaaccagggggctatcgtctctttgttcagaagctacaagacctgaagaaaaagtactatgaggaaccgaggaaggggatacaggctgaagagattctgcagacatacttgaaatccaaggagtctatgactgatgcaattctccagacagaccagactctcacagaaaaagaaaaggagattgaagtggaacgtgtgaaagctgagtctgcacaggcttcagcaaaaatgttgcaggaaatgcaaagaaagaatgagcagatgatggaacagaaggagaggagttatcaggaacacttgaaacaactgactgagaagatggagaacgacagggtccagttgctgaaagagcaagagaggaccctcgctcttaaacttcaggaacaggagcaactactaaaagagggatttcaaaaagaaagcagaataatgaaaaatgagatacaggatctccagacgaaaatgagacgacgaaaggcatgtaccataagctaaagaccagagccttcctgtcacccctaaccaaggcataattgaaacaattttagaatttggaacaagcgtcactacatttgataataattagatcttgcatcataacaccaaaagtttataaaggcatgtggtacaatgatcaaaatcatgttttttcttaaaaaaaaaaaaaagactgtaaattgtgcaacaaagatgcatttacctctgtatcaactcaggaaatctcataagctggtaccactcaggagaagtttattcttccagatgaccagcagtagacaaatggatactgagcagagtcttaggtaaaagtcttgggaaatatttgggcattggtctggccaagtctacaatgtcccaatatcaagggacaccaccctagctttcttagtgagacaatgtcagttatccatagatcagg

SEQ ID NO: 516 - DNA, 3470 bp, Homo sapiens
  misc_feature: Incyte ID No: 1994709CB1
atggccgctgcccgcccagcgcgggggccggagctcccgctcctggggctgctgctgctgctgctgctgggggacccgggccggggggcggcctcgagcgggaacgcgaccgggcctgggcctcggagcgcgggcgggagcgcgaggaggagcgcggcggtgactggccctccgccgccgctgagccactgcggccgggctgccccctgcgagccgctgcgctacaacgtgtgcctgggctcggtgctgccctacggggccacctccacactgctggccggagactcggactcccaggaggaagcgcacggcaagctcgtgctctggtcgggcctccggaatgccccccgctgctgggcagtgatccagcccctgctgtgtgccgtatacatgcccaagtgtgagaatgaccgggtggagctgcccagccgtaccctctgccaggccacccgaggcccctgtgccatcgtggagagggagcggggctggcctgacttcctgcgctgcactcctgaccgcttccctgaaggctgcacgaatgaggtgcagaacatcaagttcaacagttcaggccagtgcgaagtgcccttggttcggacagacaaccccaagagctggtacgaggacgtggagggctgcggcatccagtgccagaacccgctcttcacagaggctgagcaccaggacatgcacagctacatcgcggccttcggggccgtcacgggcctctgcacgctcttcaccctggccacattcgtggctgactggcggaactcgaatcgctaccctgctgttattctcttctacgtcaatgcgtgcttctttgtgggcagcattggctggctggcccagttcatggatggtgcccgccgagagatcgtctgccgtgcagatggcaccatgaggcttggggagcccacctccaatgagactctgtcctgcgtcatcatctttgtcatcgtgtactacgccctgatggctggtgtggtttggtttgtggtcctcacctatgcctggcacacttccttcaaagccctgggcaccacctaccagcctctctcgggcaagacctcctacttccacctgctcacctggtcactcccctttgtcctcactgtggcaatccttgctgtggcgcaggtggatggggactctgtgagtggcatttgttttgtgggctacaagaactaccgataccgtgcgggcttcgtgctggccccaatcggcctggtgctcatcgtgggaggctacttcctcatccgaggagtcatgactctgttctccatcaagagcaaccaccccgggctgctgagtgagaaggctgccagcaagatcaacgagaccatgctgcgcctgggcatttttggcttcctggcctttggctttgtgctcattaccttcagctgccacttctacgacttcttcaaccaggctgagtgggagcgcagcttccgggactatgtgctatgtcaggccaatgtgaccatcgggctgcccaccaagcagcccatccctgactgtgagatcaagaatcgcccgagccttctggtggagaagatcaacctgtttgccatgtttggaactggcatcgccatgagcacctgggtctggaccaaggccacgctgctcatctggaggcgtacctggtgcaggttgactgggcagagtgacgatgagccaaagcggatcaagaagagcaagatgattgccaaggccttctctaagcggcacgagctcctgcagaacccaggccaggagctgtccttcagcatgcacactgtgtcccacgacgggcccgtggcgggcttggcctttgacctcaatgagccctcagctgatgtctcctctgcctgggcccagcatgtcaccaagatggtggctcggagaggagccatactgccccaggatatttctgtcacccctgtggcaactccagtgcccccagaggaacaagccaacctgtggctggttgaggcagagatctccccagagctgcagaagcgcctgggccggaagaagaagaggaggaagaggaagaaggaggtgtgcccgctggcgccgccccctgagcttcacccccctgcccctgcccccagtaccattcctcgactgcctcagctgccccggcagaaatgcctggtggctgcaggtgcctggggagctggggactcttgccgacagggagcgtggaccctggtctccaacccattctgcccagagcccagtccccctcaggatccatttctgcccagtgcaccggcccccgtggcatgggctcatggccgccgacagggcctggggcctattcactcccgcaccaacctgatggacacagaactcatggatgcagactcggacttctgagcctgcagagcaggacctgggacaggaaagagaggaaccaataccttcaaggctcttcttcctcaccgagcatgcttccctaggatcccgtcttccagagaacctgtgggctgactgccctccgaagagagttctggatgtctggctcaaagcagcaggactgtgggaaagagcctaacatctccatggggaggcctcaccccagggacagggccctggagctcagggtccttgtttctgccctgccagctgcagcctggttggcagcatctgctccatcggggcagggggtatgcagagcttgtggtggggcaggaacggtggaggcagaggtgacagttcccagagtgggctttggtggccagggaggcagcctagcctatgtctggcagatgagggctggctgccgttttctgggctgatgggtgccctttcctggcagtctcagtccaaaagtgttgactgtgtcattagtcctttgtctaagtagggccagggcaccgtattcctctcccaggtgtttgtggggctggaaggacctgctcccacaggggccatgtcctctcttaataggtggcactaccccaaacccatcttttgttctcctatatcctccttctcctgttccatttcagttcagtttcagcggtgccaacctctttgcgtttcctttttgttgatgaggacccagagctgctgcacacactcacctctaaccccctcccctcgctgctgggccccatctccacaggagagactggttcggctctagggcctcagtctggagtgggataggagcagtgagtgacaaagcctctgaaagatgcatcatctcttcctcacacccatttagtgggggatgggtcctctagacttgaggggctaccctgggaagctgccgtagcttcagccaggcaagaaagcttccttcaacctgcatagccggtgggtgaggagattcccaccttccatagcctccaaacatgttcccaaggccccactttcaagaatcagacagcaggaagccatagatgctggctgggttccaggttatggggagaagaaatacagtcaataaaaggtttttgtataaaaaaaaaaaaaaa

SEQ ID NO: 517 - DNA, 980 bp, Homo sapiens
  misc_feature: Incyte ID No: 2238363CB1
ggggcaaaggaggggcaccctgacatggagcctgccagctccgtcagccctgactcggcccggagctgagctccccacctgccggtagcccaggagatggagcagcccagcccacgtgcccggccttccgcccctgacttcacttgataacaaactagaaactgaaacagggtcgggatgccgatgccggcttggagttagagatgagtcaccgctgagagcagctgcagtagctgagcagtggcagcagagaggcagacgtgagctgagggcgcagaggcaggcagcatctctgagggtccccaaggagcatggctgggagccgtgaggtggtggccatggactgcgagatggtggggctggggccccaccgggagagtggcctggctcgttgcagcctcgtgaacgtccacggtgctgtgctgtacgacaagttcatccggcctgagggagagatcaccgattacagaacccgggtcagcggggtcacccctcagcacatggtgggggccacaccatttgccgtggccaggctagagatcctgcagctcctgaaaggcaagctggtggtgggtcatgacctgaagcacgacttccaggcactgaaagaggacatgagcggctacacaatctacgacacgtccactgacaggctgttgtggcgtgaggccaagctggaccactgcaggcgtgtctccctgcgggtgctgagtgagcgcctcctgcacaagagcatccagaacagcctgcttggacacagctcggtggaagatgcgagggcaacgatggagctctatcaaatctcccagagaatccgagcccgccgagggctgccccgcctggctgtgtcagactgaagccccatccagcccgttccgcagggactagaggctttcggctttttgggacagcaactaccttgcttttggaaaatacatttttaatagtaaagtggctctatattttctctaaaaaaaaaa

SEQ ID NO: 518 - DNA, 872 bp, Homo sapiens
  misc_feature: Incyte ID No: 087978.25
atttctcttgactgagaatggtgccacgtgtggtctgtaagtaggtggtcagctgtagctggatgtgtgccttgaaaggctgacaagtttgccctgagtgactcacctactgtcacctgatccaacaagatttgtgggcgtacctgccgatgggtgacgccagttaaagcatctctgagggtccccaaggaacatggctgggagccgtgaggtggtggccatggactgcgagatggtggggctggggccccaccgggagagtggcctggctcgttgcagcctcgtgaacgtccacggtgctgtgctgtacgacaagttcatccggcctgagggagagatcaccgattacagaacccgggtcagcggggtcacccctcagcacatggtgggggccacaccatttgccgtggccaggctagagatcctgcagctcctgaaaggcaagctggtggtgggtcatgacctgaagcacgacttccaggcactgaaagaggacatgagcggctacacaatctacgacacgtccactgacaggctgttgtggcgtgaggccaagctggaccactgcaggcgtgtctccctgcgggtgctgagtgagcgcctcctgcacaagagcatccagaacagcctgcttggacacagctcggtggaagatgcgagggcaacgatggagctctatcaaatctcccagagaatccgagcccgccgagggctgccccgcctggctgtgtcagactgaagccccatccagcccgttccgcagggactagaggctttcggctttttgggacagcaactaccttgcttttggaaaatacatttttaatagtaaagtggctctatattttctctacgccaaaaaaaaaaaaaaa

SEQ ID NO: 519 - DNA, 2068 bp, Homo sapiens
  misc_feature: Incyte ID No: 1670469CB1
aacaaatttggaggctaaaataacattctacataaggaactatactacagtagaattaattgatagcagggattaagagatgtaaatgaatttgagatacatattctagaggtagaatgtgcaatactttttgtatgtccatatacagaaattggttgcattttccttaaataaaaagattttttaaaagttagtgagctgttatgttttcttccctctgacttcaattccttgattctttcagtttttttgatatggatttactgtctaaaagcaggatcagcttatgctcctttgatgagagaagttggcatgctgtcaagagggcagggcacactgagtttcagtttcctttctctgagtctttgaagcttcaaggctgctgaataatttccttctcccattttgtgccagcctagctatccagacagagcagctaccctcagctctagctgatactacagacagtacaacagatcaagaagtatggcagtgacaactcgtttgacatggttgcacgaaaagatcctgcaaaatcattttggagggaagcggcttagccttctctataagggtagtgtccatggattccgtaatggagttttgcttgacagatgttgtaatcaagggcctactctaacagtgatttatagtgaagatcatattattggagcatatgcagaagagagttaccaggaaggaaagtatgcttccatcatcctttttgcacttcaagatactaaaatttcagaatggaaactaggactatgtacaccagaaacactgttttgttgtgatgttacaaaatataactccccaactaatttccagatagatggaagaaatagaaaagtgattatggacttaaagacaatggaaaatcttggacttgctcaaaattgtactatctctattcaggattatgaagtttttcgatgcgaagattcactggatgaaagaaagataaaaggggtcattgagctcaggaagagcttactgtctgccttgagaacttatgaaccatatggatccctggttcaacaaatacgaattctgctgctgggtccaattggagctgggaagtccagctttttcaactcagtgaggtctgttttccaagggcatgtaacgcatcaggctttggtgggcactaatacaactgggatatctgagaagtataggacatactctattagagacgggaaagatggcaaatacctgccgtttattctgtgtgactcactggggctgagtgagaaagaaggcggcctgtgcagggatgacatattctatatcttgaacggtaacattcgtgatagataccagtttaatcccatggaatcaatcaaattaaatcatcatgactacattgattccccatcgctgaaggacagaattcattgtgtggcatttgtatttgatgccagctctattcaatacttctcctctcagatgatagtaaagatcaaaagaattcgaagggagttggtaaacgctggtgtggtacatgtggctttgctcactcatgtggatagcatggatttgattacaaaaggtgaccttatagaaatagagagatgtgagcctgtgaggtccaagctagaggaagtccaaagaaaacttggatttgctctttctgacatctcggtggttagcaattattcctctgagtgggagctggaccctgtaaaggatgttctaattctttctgctctgagacgaatgctatgggctgcagatgacttcttagaggatttgccttttgagcaaatagggaatctaagggaggaaattatcaactgtgcacaaggaaaaaaatagatatgtgaaaggttcacgtaaatttcctcacatcacagaagattaaaattcagaaaggagaaaacacagaccaaagagaagtatctaagaccaaagggatgtgttttattaatgtctaggatgaagaaatgcatagaacattgtagtacttgtaaataactagaaataacatgatttagtcataattgtgaaaaataataataatttttcttggatttatgttctgtatctgtgaaaaaataaattt

SEQ ID NO: 520 - DNA, 2515 bp, Homo sapiens
  misc_feature: Incyte ID No: 231486.16
ttatatcttataaatgaagtctcctcattttcctgtggtcagaagagagggggcaagcagaaaagcagaggaacaaatttggaggctaaaataacattctacataaggaactatactacagtagaattaattgatagcagggattaagagatgtaaatgaatttgagatacatattctagaggtagaatgtgcaatactttttgtatgtccatatacagaaattggttgcattttccttaaataaaaagattttttaaaagttagtgagctgttatgttttcttccctctgacttcaattccttgattctttcaatttttttaatataaatttactgtctaaaagctggatcagcttatgctcctttgttgagagaagttggcatgctgtcaagtgggctgggcacactgagtttcagtttcctttctctgagtctttgaagcttcaaggctgctgaataatttccttctcccattttgtgcctgcctagctatccagacagagcagctaccctcagctctagctgatactacagacagtacaacagatcaagaagtatggcagtgacaactcgtttgacatggttgcacgaaaagatcctgcaaaatcattttggagggaagcggcttagccttctctataagggtagtgtccatggattccgtaatggagttttgcttgacagatgttgtaatcaagggcctactctaacagtgatttatagtgaagatcatattattggagcatatgcagaagagagttaccaggaaggaaagtatgcttccatcatcctttttgcacttcaagatactaaaatttcagaatggaaactaggactatgtacaccagaaacactgttttgttgtgatgttacaaaatataactccccaactaatttccagatagatggaagaaatagaaaagtgattatggacttaaagacaatggaaaatcttggacttgctcaaaattgtactatctctattcaggattatgaagtttttcgatgcgaagattcactggatgaaagaaagataaaaggggtcattgagctcaggaagagcttactgtctgccttgagaacttatgaaccatatggatccctggttcaacaaatacgaattctgctgctgggtccaattggagctgggaagtccagctttttcaactcagtgaggtctgttttccaagggcatgtaacgcatcaggctttggtgggcactaatacaactgggatatctgagaagtataggacatactctattagagacgggaaagatggcaaatacctgccgtttattctgtgtgactcactggggctgagtgagaaagaaggcggcctgtgcagggatgacatattctatatcttgaacggtaacattcgtgatagataccagtttaatcccatggaatcaatcaaattaaatcatcatgactacattgattccccatcgctgaaggacagaattcattgtgtggcatttgtatttgatgccagctctattcaatacttctcctctcagatgatagtaaagatcaaaagaattcgaagggagttggtaaacgctggtgtggtacatgtggctttgctcactcatgtggatagcatggatttgattacaaaaggtgaccttatagaaatagagagatgtgagcctgtgaggtccaagctagaggaagtccaaagaaaacagagtaaacatctgccaacgtttattgacagtgctgagcagtgacagataaatatttcgaacctaggcagtttgattctagaggtaaaatagtctaaacaagaattaaacgttaaactggtctaataaaatctacttatccagagaatgttttttaaaagaaacaggaaatatatggactgtaggataggtgtcataaaaattttgtttctaaatcatttagaatccactgcatgtattccaaattacaattatcagtgacattagaacttgatatgtgaagttcttcaagagtactttgtgagaccagatctccatttttttccaatgggaaattattgcaagttcctacatcttgatattgctttcgtaatttatactaacataaaataatatttttcactgttttgcaatgtctttttaatttctgtattgcagctagaggaagtccaaagaaaacttggatttgctctttctgacatctcggtggttagcaattattcctctgagtgggagctggaccctgtaaaggatgttctaattctttctgctctgagacgaatgctatgggctgcagatgacttcttagaggatttgccttttgagcaaataggtagatgtgtttggtggtgtggaagcttggaagcggtcaggtagttggctactttctgcttggatctattaaatacctggcagctctctgtctttttgtgggttgttgccctgtgattagttctgctttttaacccactccctggatgcattttccctccttgcattccctcttttcctggagttcatactagagaatctgcactatgttt

SEQ ID NO: 521 - DNA, 2383 bp, Homo sapiens
  misc_feature: Incyte ID No: 3463621CB1
cagagaggagactatggaacgtcaggtgctgctgagcgagcccgaggaggcggcggctctgtatcggggccttagccgccagcccgcgctgagcgccgcctgcctgggcccggaggtcaccacgcagtacggcggccaataccggacggtgcacactgagtggacccagagggacctggaacgcatggagaacattcgattctgccgccaatacctggtgttccatgacggggactcagtggtgtttgcaggacctgcaggcaacagtgtggagacccggggggaactgctgagcagagagtctccttcaggcaccatgaaagctgtgctgcgcaaggctggaggcacgggccctggggaagagaagcagttcctggaggtctgggagaagaaccggaagctcaagagcttcaacctgtcagcgctggagaaacatgggcctgtttatgaggatgactgctttggctgcctgtcctggtcgcactcggagacacacttgttgtatgtggcagagaagaagcgccccaaggccgagtccttctttcagaccaaagccttggacgtcagtgccagcgatgatgagatagccaggctgaagaagccagaccaagccatcaagggggatcagtttgtgttttatgaagactggggagaaaacatggtttccaaaagcatccctgtgctctgcgtgctggatgtcgagagtggcaacatctctgtgcttgagggggtccctgagaatgtgtcccctggacaggcattttgggcccctggagatgctggtgtggtgtttgtgggctggtggcatgagcccttccggttgggcatccgcttttgcaccaatcgcaggtcagccctgtattatgtggacctcatcggggggaagtgtgagctcctctcggatgactccctggctgtctcttctccccggctgagcccagaccaatgtcgcattgtctacctgcagtacccatctctgatcccccatcaccaatgcagccagctgtgcctgtatgactggtataccaaggttacctcagtggtggtagatgttgtgcctcggcagctgggagagaacttctctgggatctactgcagccttctgcctttgggatgctggtcagctgacagccagagagtggtctttgactcggctcagcgcagccggcaggacctgtttgctgtggacacccaagtgggcactgtgacctccctcacagctggagggtcaggtgggagctggaagttgctcacaattgaccaggacctcatggtggcacagttttccacacccagcctacctccaaccctgaaagttgggttcctgccttctgcagggaaggagcagtcagtgttgtgggtgtccctggaggaggccgagcccattcccgacatccactggggcatccgggtgctacagccacccccagagcaagagaatgtgcagtatgctggccttgactttgaagcaatcctgctgcagcctggcagccctccagataagacccaagtgcccatggtggtcatgccccacggggggccccattcatcctttgtcactgcctggatgctgttcccagccatgctttgcaagatgggctttgcggtactactagtgaactatcgtggctccacgggctttggccaggacagcatcctctccctcccaggcaatgtgggccaccaggatgtgaaggatgtccagtttgcagtggaacaggtgctccaggaggaacactttgatgcaagccatgtggcccttatgggtggttcccatggtggcttcatttcctgccacttgattggtcagtacccagagacctacagggcctgcgtggcccggaaccccgtgatcaacatcgcctccatgttgggctccactgacatccctgactggtgcgtggtggaggctggctttcctttcagcagtgactgcctgccagacctcagcgtgtgggctgagatgctggacaaatcgcccatcagatacatccctcaggtgaagacaccactgttactgatgttgggccaggaggaccggcgtgtgcccttcaagcagggcatggagtattaccgtgccctcaagacccggaatgtgcctgttcggctcctgctctatcccaaaagcacccacgcattatcagaggtggaggtggagtcagacagcttcatgaatgctgtgctctggctacgcacacacttgggcagctgaagccctgccattctgcatgagctgatcagcctgtgccacacttcgctcttgaggagctcaacggtctggcagggcagcaggaggctttctgggctctggactccacggatgcgtgggcagaggaatgtgggctatgtagtcataataaattaggacacagaaaaaaaaaaa

SEQ ID NO: 522 - DNA, 675 bp, Homo sapiens
  misc_feature: Incyte ID No: 1040511.17
cgccgagatgcgggtcacggcgccccgaaccctcctcctgctgctctggggggcagtggccctgaccgagacctgggctggctcccactccatgaggtatttccacacctccgtgtcccggcccggccgcggggagccccgcttcatcaccgtgggctacgtggacgacacgctgttcgtgaggttcgacagcgacgccacgagtccgaggaaggagccgcgggcgccatggatagagcaggaggggccggagtattgggaccgggagacacagatctccaagaccaacacacagacttaccgagagagcctgcggaacctgcgcggctactacaaccagagcgaggccgggtctcacaccctccagagcatgtacggctgcgacgtggggccggacgggcgcctcctccgcgggcataaccagtacgcctacgacggcaaggattacatcgccctgaacgaggacctgcgctcctggaccgccgcggacacggcggctcagatcacccagcgcaagtgggaggcggcccgtgtggcggagcagctgagagcctacctggagggcgagtgcgtggagtggctccgcagatacctggagaacgggaaggagacgctgcagcgcgcggaccccccaaagacacacgtgacccaccaccccatctctgaccatgaggc

SEQ ID NO: 523 - DNA, 2086 bp, Homo sapiens
  misc_feature: Incyte ID No: 1974073CB1
cgagcgccacgtcgggaaccgggaaaaggaaaccgtgttgtgtacgtaagattcaggaaacgaaaccaggagccgcgggtgttggcgcaaaggttactcccagacccttttccggctgacttctgagaaggttgcgcacagctgtgcccggcagtctagaggcgcagaagaggaagccatcgcctggccccggctctctggaccttgtctcgctcgggagcggaaacagcggcagccagagaactgttttaatcatggacaaacaaaactcacagatgaatgcttctcacccggaaacaaacttgccagttgggtatcctcctcagtatccaccgacagcattccaaggacctccaggatatagtggctaccctgggccccaggtcagctacccacccccaccagccggccattcaggtcctggcccagctggctttcctgtcccaaatcagccagtgtataatcagccagtatataatcagccagttggagctgcaggggtaccatggatgccagcgccacagcctccattaaactgtccacctggattagaatatttaagtcagatagatcagatactgattcatcagcaaattgaacttctggaagttttaacaggttttgaaactaataacaaatatgaaattaagaacagctttggacagagggtttactttgcagcggaagatactgattgctgtacccgaaattgctgtgggccatctagaccttttaccttgaggattattgataatatgggtcaagaagtcataactctggagagaccactaagatgtagcagctgttgttgtccctgctgccttcaggagatagaaatccaagctcctcctggtgtaccaataggttatgttattcagacttggcacccatgtctaccaaagtttacaattcaaaatgagaaaagagaggatgtactaaaaataagtggtccatgtgttgtgtgcagctgttgtggagatgttgattttgagattaaatctcttgatgaacagtgtgtggttggcaaaatttccaagcactggactggaattttgagagaggcatttacagacgctgataactttggaatccagttccctttagaccttgatgttaaaatgaaagctgtaatgattggtgcctgtttcctcattgacttcatgttttttgaaagcactggcagccaggaacaaaaatcaggagtgtggtagtggattagtgaaagtctcctcaggaaatctgaagtctgtatattgattgagactatctaaactcatacctgtatgaattaagctgtaaggcctgtagctctggttgtatacttttgcttttcaaattatagtttatcttctgtataactgatttataaaggtttttgtacattttttaatactcattgtcaatttgagaaaaaggacatatgagtttttgcatttattaatgaaacttcctttgaaaaactgctttgaattatgatctctgattcattgtccattttactaccaaatattaactaaggccttattaatttttatataaattatatcttgtcctattaaatctagttacaatttatttcatgcataagagctaatgttattttgcaaatgccatatattcaaaaaagctcaaagataattttctttactattatgttcaaataatattcaatatgcatattatctttaaaaagttaaatgtttttttaatcttcaagaaatcatgctacacttaacttctcctagaagctaatctataccataatattttcatattcacaagatattaaattaccaattttcaaattattgttagtaaagaacaaaatgattctctcccaaagaaagacacattttaaatactccttcactctaaaactctggtattataacttttgaaagttaatatttctacatgaaatgtttagctcttacactctatccttcctagaaaatggtaattgagattactcagatattaattaaatacaatatcatatatatattcacagagtataaacctaaataatgatctattagattcaaatatttgaaataaaaacttgatttttttgtaaaaaaaaaaa

SEQ ID NO: 524 - DNA, 409 bp, Homo sapiens
  misc_feature: Incyte ID No: 2717395CB1
cttccacgtgcacccactgcctcttcccttctcgcttgggaactctagtctcgcctcgggttgcaatggaccccaactgctcctgtgccgctggtgtctcctgcacctgcgccagctcctgcaagtgcaaagagtgcaaatgcacctcctgcaagaagagctgctgctcctgctgccctgtgggctgtgccaagtgtgcccagggctgcatctgcaaaggggcatcggagaagtgcagctgctgcgcctgatgtcgggacagccctgctcccaagtacaaatagagtgacccgtaaaatccaggattttttgttttttgctacaatcttgacccctttgctacattcctttttttctgtgaaatatgtgaataataattaaacacttagacttgaaaaaaaaaaaaaaa

SEQ ID NO: 525 - DNA, 442 bp, Homo sapiens
  misc_feature: Incyte ID No: 2757583CB1
cctgactatcaaagcagcggccggctgttggggtccaccacgccttccacctgccccactgcttcttcgcttctctcttggaaagtccagtctctcctcggcttgcaatggaccccaactgctcctgcgccgctggtgtctcctgcacctgcgctggttcctgcaagtgcaaagagtgcaaatgcacctcctgcaagaagagctgctgctcctgctgccccgtgggctgtagcaagtgtgcccagggctgtgtttgcaaaggggcgtcagagaagtgcagctgctgcgactgatgccaggacaacctttctcccagatgtaaacagagagacatgtacaaacctggattttttttttataccaccttgacccatttgctacattccttttcctgtgaaatatgtgagtgataattaaacactttagacctgaaaaaaaaaaa

SEQ ID NO: 526 - DNA, 4315 bp, Homo sapiens
  misc_feature: Incyte ID No: 411418.2
  unsure 4302: a, t, c, g, or other
gtcatgccccagaaattgtgtctacagttcatgaagattattctggctcttctgaaagttcaaatgatgaaagtgattcagaagatacagattcggatgatagcagtattccaagaaaccgtctccagtctgttgtggttgtgccaaagaattctactttgcccatggaagaaacaagtccttgttcttctcggagcagtcaaagttatagacactattctgaccattgggaagatgagagattggagtcaaggagacatttgtatgaggaaaaatttgaaagtatagcaagtaaagcctgtcctcaaactgataagtttttccttcataaaggaacagagaagaatccggaaatttcttttacacagtccagtagaaaacaaatagataaccgcctgcctgaactttctcatcctcagagtgatggggttgatagtacaagtcatacagatgtgaaatctgaccctctgggtcacccaaattcagaggaaaccgtgaaagccaaaataccttctaggcagcaagaagagctgccaatttattcttctgattttgaagatgtcccaaataagtcttggcaacagaccactttccaaaacaggccagatagtagactgggaaaaacagaattgagtttttcttcctcttgtgagataccacatgtggatggcttgcactcatcagaagagctcagaaacttaggttgggacttctctcaagaaaagccttctaccacgtatcagcaacctgacagtagctatggagcttgtggtggacacaagtatcagcaaaatgcagaacagtatggtgggacacgtgattactggcaaggcaatggttactgggatccaagatcaggtagacctcctggaactggggttgtgtatgatcgaactcaaggacaagtaccagattccctaacagatgatcgtgaagaagaggagaattgggatcaacaggatggatcccatttttcagaccagtccgataaatttcttctatcccttcagaaagacaaggggtcagtgcaagcacctgaaataagcagcaattccattaaggacactttagctgtgaatgaaaagaaagatttttcaaaaaacttagaaaaaaatgatatcaaagatagagggcctcttaaaaaaaggaggcaggaaatagagagtgattctgaaagtgatggtgagcttcaggacagaaagaaagttagagtggaggtagagcagggagagacatcagtgcccccaggttcagcactggttgggccctcctgtgtcatggatgacttcagggacccacagcgatggaaggaatgtgccaagcaagggaaaatgccatgttactttgatcttattgaagaaaatgtttatttaacagaaagaaagaagaataaatctcatcgagatattaagcgaatgcagtgtgagtgtacacctctttctaaagatgaaagagctcaaggtgaaatagcatgtggggaagattgtcttaatcgtcttctcatgattgaatgttcttctcggtgtccaaatggggattattgttccaatagacggtttcagagaaaacagcatgcagatgtggaagtcatactcacagaaaagaaaggctggggcttgagagctgccaaagaccttccttcgaacacctttgtcctagaatattgtggagaggtactcgatcataaagagtttaaagctcgagtgaaggagtatgcacgaaacaaaaacatccattactatttcatggccctgaagaatgatgagataatagatgccactcaaaaaggaaattgctctcgtttcatgaatcacagctgtgaaccaaattgtgaaacccaaaaatggactgtgaacggacaactgagggttgggttttttaccaccaaactggttccttcaggctcagagttaacgtttgactatcagttccagagatatggaaaagaagcccagaaatgtttctgcggatcagccaattgccggggttacctgggaggagaaaacagagtcagcatcagagcagcaggagggaaaatgaagaaggaacgatctcgtaagaaggattcagtggatggagagctagaagctctgatggaaaatggtgagggtctctctgataaaaaccaggtgctcagcttatcccggctaatggttagaattgaaactttggagcagaaacttacctgtctggaactcatacagaacacacactcacagtcctgcctgaagtcctttctggaacgtcatgggctgtctttgttgtggatctggatggcagagctaggtgacggccgggaaagtaaccagaagcttcaggaagagattataaagactttggaacacttgcccattcctactaaaaatatgttggaggaaagcaaagtacttccaattattcaacgctggtctcagactaagactgctgtccctccgttgagtgaaggagatgggtattctagtgagaatacatcgcgtgctcatacaccactcaacacacctgatccttccaccaagctgagcacagaagctgacacagacactcccaagaaactaatgtttcgcagactgaaaattataagtgaaaatagcatggacagtgcaatctctgatgcaaccagtgagctagaaggcaaggatggcaaagaggatcttgatcaattagaaaatgtccctgtagaggaagaggaagaattgcagtcacaacagctactcccacaacagctgcctgaatgcaaagttgatagtgaaaccaacatagaagctagtaagctacctacatctgaaccagaagctgacgctgaaatagagcccaaagagagcaacggcacaaaactagaagaacctattaatgaagaaacaccatcccaagatgaagaggagggtgtgtctgatgtggagagtgaaaggagccaagaacagccagataaaacagtggatataagtgatttggccaccaaactcctggacagttggaaagacctaaagcttctcagggcagcaaggagcttgttaacatcaccagctgaccatgtgtctccttttctcaactccatttccaacttcgtgctgaagaaaaacgagaacctagcgtgcattctgtgaagaaacaggaagatggttgggaagttggatgatgcatgaaaaatataataggtgaaaagaggacagaggtggttaactcactggcgccggcgttattttggtgcgtccattgccgacaatggatgtcgttccgggaaaatccctactcctggcgagaaaggattaagtgagctactttttctatacctatatacacaggaccactgccttgactccacaaggcttacacattttgactcctaaagtagacctcaaccagaaacatcacctagcacattgccacttgtgagcatgtattcattttcatgtgaaaatttactaggctacattttcagcagggatatgtgcatatatttctgtttgcagaagaaattgttgcatatcacccttcatgctgaaaatataccctagacttcatagggcaaaacagctggttaccagtggtgactaagtgtaacttgactggaatatcttcattcatttggatcataagaagaggaggtaaggttcctgtgaacttggcaatttcatttgccattaaacaccgagagattgtaatggttagtgattccagagcctctcttataaacacttagattataggatgtgcatttctccttagaatgaagtctgggtatttccatttgcatctggatttagatgatttagggacaaaattacctacatgtgataagttgaactcttcctaatgactattcttattcttctcttatttcatctttatctcaagacattatctttaattcagcaaatcaagtatttccctagaaagctatgtattaaaactctctatgaaaagttaaaataaaacatagagttgcctaaactgagaagttttgagtcactgtttggaatttcactccctcgctaatattgtatgtgaaatctgctgtgcaacatttgaaaatgaaattatgtttcctggatttctgtgataatttttgaattcttactagagtaagattattctgtatccataaggattaatattacttatcctttaacaaaattagaattgcccctaaagaatgctgttttagctacagcaacattgaaatttttaaataaatgtctcgtttggtagaaggcaaaaatggtctaaaatttattggtccattttttaaccaaatactttcatctaaatcaagggttggccaaatctgcccccactgtctgnttttggtaaataa

SEQ ID NO: 527 - DNA, 3555 bp, Homo sapiens
  misc_feature: Incyte ID No: 023244.5
  unsure 1626: a, t, c, g, or other
accctggggagggacgtgttgaagaagagaactttctaactccagacaaacgctttcaaaataccgttggctaggtggctgtttccttggtggtggaaaacgtcatttaaagtccttttcatgttttcatagcaggcaaaatacatggcatgggctggccctgcacccatgatcatgacgttgacgcctcgcaagggcctccagaagccttcggtccgcatgattttcttgagggctccgtagacacttgtgtactgggctttgggatctggactcaaactctgcattcgtgtcttcaaggacgccaccgggtcggaggactacgagaacctgccgactagcgcctccgtgtccacccacatgacagcaggagcgatggccgggatcctggagcactcggtcatgtacccggtggactcggttaagacacgaatgcagagtttgagtccagatcccaaagcccagtacacaagtatctacggagccctcaagaaaatcatgcggaccgaaggcttctggaggcccttgcgaggcgtcaacgtcatgatcatgggtgcagggccagcccatgccatgtattttgcctgctatgaaaacatgaaaaggactttaaatgacgttttccaccaccaaggaaacagccacctagccaacgggatagctgggagtatggccaccctgctccacgatgcggtaatgaatccagcagaagtggtgaagcagcgcttgcagatgtacaactcgcagcaccggtcagcaatcagctgcatccggacggtgtggaggaccgaggggttgggggccttctaccggagctacaccacgcagctgaccatgaacatccccttccagtccatccacttcatcacctatgagttcctgcaggagcaggtcaacccccaccggacctacaacccgcagtcccacatcatctcaggcgggctggccggggccctcgccgcggccgccacgacccccctggacgtctgtaagacccttctgaacactcaggagaacgtggccctctcgctggccaacatcagcggccggctgtcgggtatggccaatgccttccggacggtgtaccagctcaacggcctggccggctacttcaaaggcatccaggcgcgtgtcatctaccagatgccctccaccgccatttcttggtctgtctatgagttcttcaagtactttctcaccaagcgccagctggaaaatcgagctccatactaaaggaagggatcatagaatcttttcttaaagtcattctctgcctgcatccagccccttgccctctcctcacacgtagatcatttttttttttgcagggtgctgcctatgggccctctgctccccaatgccttagagagaggaggggacggcacggccgctcaccggaaggctgtgtgcggggacatccgaggtggtggtggacaggaaggacttgggaaggggagcgagaaattgctttttctcttcctccctgggcagaatgtagcttttctgcttcactgtggcagcctcctccctggatccttagatcccagaggagggaagaaaatttgcagtgactgaaaacagtaaaaaaaaaaaaaaaaaaaaaaaaaaaaaaaattatgtatatangtatataaaagttgcattacacagtacaaaatagatggataatgtttatcctttatttttctatgtagaagtttttgaatttgtgtgtgtgcttgtgcgtgtctacacctagtattacggctgggactctccagctgtttttgttgttgttatgtttttaagagggttgaattcttccatcaggtgaacgaaaaaggcaacaaagtaataaatcagtgaatgtggccggcagctgtgtttagcccctccagatggaagtttcacttgaatgtaaaataataaagtttatattttgaatttctcttttcatgggggaaaaaaggtacgttaaaaaaatcaaaataatgatatgtcacttgcagctaccttttttttttcttttaaattcaatcagccaccttcatgtgcctttttcctttgtctttccccaaaattccaggaccagagatctggccctggcctattttctcttgctgtgtacacacacgcacacatgctgggtggcaggatctcgcccgctggagggtggtggagcccagtagaattggggtgactgggcataaacctgctgagactgcttccttccctggttgtgagtgatgtgaatgcctgccttccccggtcagcacttagaagcccttgataggcagcatttggcgacttgtggggcaggtgtttgggataaatcctaccttcatcctaggacttatttctgcatcagccttttaactcaggcacttcaggtaacgtgatctatgtgtgttttgactgaatctcatctcctgtgtttccctgtgcagtctagggaagcatgtctccagtctttgtccctgtcttgtcccaaccattaattctcatgtcacagcttctcactgcatgtgacaagagccaggcctatctgctagggccctgcggctgaggtctgacctggaccctcatgcccgagtcggaagacccctctccagaagccattctgcatccttgtctgctctgcgtcacccgagaacacaggcttcgcagcctcgctttctgaaatggtgtgtgccgagtcagattgccgctcagagaaaatacaagcccgttttccctagctgtgccatttggtgctctgccaggctgccgtgcaagggaataccgacgagacgagctgcactgtctctgatttggagccctcaccggagcttgtctttaaaaatgagcaggaagctcatgtatgtttgcatttcagtgagccgggtcctgacctgccgccacccatcacggtcagcgtggtgcatctcaccgaggaggcgcaggcctggattcttttgagtggtgctactgcctaggaagtaacacgtggagaatttccatcttgggaccatgcacacagtgccttggggagtagattttgccctaatagcgatgaagaattttatcagtcagtggagttcctttttcagatcagggatgggaaagagccaaactgggtacctcccacgtgtgccccgtgaacagccctttgcagctgggctgtggggcttggctgctgccctgtcccatctggcagttaacgccttctccctgctctgccccccactccccaaaaccagttgcagcctcaacccacatggggatgtagaaagccgtaaagtccacgctactgttgaaaatgtttacatctccgctctcaacctgccttgggttcgtgttaaatggtgttaaattctgcaaatggaggggaaaaaaatcaaattctaaatttcaaagtagaatttaaagcaaatttgtaaaaaaattatcctaccaccccttttggtccacttaagatatgccacgctgaagcaaggtatttcctactggattttgctttcactggtgtttagaaaataaacttgatttctctaggagcactcctttggttagagggatgcaagaaggagaggtgaa

SEQ ID NO: 528 - DNA, 2901 bp, Homo sapiens
  misc_feature: Incyte ID No: 023244.6
  unsure 2064-2065, 2069, 2071, 2079-2080, 2889, 2896: a, t, c, g, or other
ccccagcccgccatggcgtcaggcgccgcggccccggggaggtggctcccactttaagaagtgaagttttgctcccctccccctccgtgtccacctcctgcagcctcctgcgccccgccgagctggcggatggagctgcgcagcgggagcgtgggcagccaggcggtggcgcggaggatggatggggacagccgagatggcggcggcggcaaggacgccaccgggtcggaggactacgagaacctgccgactagcgcctccgtgtccacccacatgacagcaggagcgatggccgggatcctggagcactcggtcatgtacccggtggactcggtgaagacacgaatgcagagtttgagtccagatcccaaagcccagtacacaagtatctacggagccctcaagaaaatcatgcggaccgaaggcttctggaggcccttgcgaggcgtcaacgtcatgatcatgggtgcagggccagcccatgccatgtattttgcctgctatgaaaacatgaaaaggactttaaatgacgttttccaccaccaaggaaacagccacctagccaacggtattttgaaagcgtttgtctggagttagaaagttctcttcttcaacacgtccctccccagggtgttcctccctgtgacccagccgcctcgacttcggcccgcttgctcacgaataaagaactcagagttgtgtgtgcaatgcacacccagacacacgcacgcacacacacgcgcgcgcacacacatgcttttttctgttcccctccgctttctgaagcctggggagaaatcagtgacagaggtgttttggttttattgttatgtgggttttcttttgtattttttttgtttgttttgtttttaaacattcaaaagcaattaatgatcagacataggagaaaccctgaatagaaacaaaacttttgaatgctggattcaaaaaaaaaaaaaagttatctggacagcttctttgagactatttaaaaactggtacaacaggtctctacaacgccaagatctaactaagctttaaaaggtcaagaagttttatggctgacaaaggactcgcgcaacgcagaaggcctttcccaccttaagcttccggggatctgggaattttacccccattctcttctgtttgtctgagtctcatctctctgcaagcaagggctgaaatcattttgtttggttgttttgagggagagaggcggggtgggggggtgcaaatctgccagcagctcttacgtaaggcatgttttattggggagggctgagcttttattttctcctctccagtggggttggcttttattgtttcttgtttgggtttggaatggaaatatggatagcagcataaagtacttttattttgacaaaattcatttttttcaacaatggagacatagatttgacccacaataacttctccccctctctttttactctgctcaaaaagcatctctcctcccattacccaaccttggtcataagtgtgcctggctggtttgcagatatttgttctgctttgtaaaaattggccattagtgcatttattgagatgatctctaaagagctatgccctgacctacccctgattctatgacattggggcccttcttttgctgaaactgccttacgtaatggttttactccttgaaagagatttgacggaatccattttatgccaagtgctgccctgcactgtttctgcaatatgtggtgtatgctgtggtgatcttgctgggaatgattataagtgtgtgtgtggtgggggagtgggtattacatgcattgctgaagagtcatcctggtgttcctcattcctcccaccttcccgtggtcattttaattacggggcagtgtcaccgcaaagggaggaaactcaaagccgaaagcaaaattccaggcctgattctggcttttgaggttcctggttcttgaagccaggcctgacccgactctcagatggggtcagtcccgtcgctttgcagactgaccctggaaatctacaaaatgcagattttcctgatttcctcttctcttgcccagttttttnntgtntntttttttnnaaaagcctggattgtaaccagattttcttttttcccccttctcagctgtagatatgatatctcctttcagggcccccagcttaagggcaaagtgagttaatgtgtagacaaaggcgagggacaagagagagttaacatctagacagtggaaaaagccatggtgtgtggtttctgggaaccaccaacacttgcaggtttagctttttcccagggttgactacaagaaagaaaaccatgtttttgcaagattaaaatgtggttgagtgtgcctaaattaaccatccccatttttatcatatttccaccatcacttcagggttttaagagtcagtgctcacctgggcggagctggtagtacattttgcttcttagaaagctaagtcctgggttccgtctgattttaggttccaggaacttcctgagaacacccgatcgcagagggtaattttctggagtttgttttgcagggatagctgggagtatggccaccctgctccacgatgcggtaatgaatccagcagaaggtaatgtttcatggtcccagggaggggcagtaggggatgtgcaaaggggcacaaaaaatggttgtgggagagtggagaggactgaaggtgggcagagcggctcctagtctccagtcagagcagacaggagaattgaattttttactacgttatcaaaggcctcaagaaaggacgtgaacataagagtttttggtattcctgtgctcggagctactcaaagtgtgttctacagaccagcagcatcagacatcttgaggggtgttggaaatgctaattctgaggctnggtgcantggct

SEQ ID NO: 529 - DNA, 768 bp, Homo sapiens
  misc_feature: Incyte ID No: 023244.3
aaagctggattgtaaccagattttcttttttcccccttctcagctgtagatatgatatctcctttcagggccccagcttaagggcaaagtgagttaatgtgtagacaaaggcgagggacaagagagagttaacatctagacagtggaaaaagccatggtgtgtggtttctgggaaccaccaacacttgcaggtttagctttttcccagggttgactacaagaaagaaaaccatgtttttgcaagattaaaatgtggttgagtgtgcctaaattaaccatccccatttttatcatatttccaccatcacttcagggttttaagagtcagtgctcacctgggcggagctggtagtacattttgcttcttagaaagctaagtcctgggttccgtctgattttaggttccaggaacttcctgagaacacccgatcgcagagggtaattttctggagtttgttttgcagggatagctgggagtatggccaccctgctccacgatgcggtaatgaatccagcagaagtggtgaagcagcgcttgcagatgtacaactcgcagcaccggtcagcaatcagctgcatccggacggtgtggaggaccgaggggttgggggccttctaccggagctacaccacgcagctgaccatgaacatccccttccagtccatccacttcatcacctatgagttcctgcaggagcaggtcaacccccaccggacctacaacccgcagtcccacatcatctcaggcgggctggccggggccctcgc

SEQ ID NO: 530 - DNA, 2323 bp, Homo sapiens
  misc_feature: Incyte ID No: 2580428CB1
tacgccaccgcgtccgagcccaaggcaagagcgctacgcgccctgcccgaagtgcaactgtcagtgagcctgcgcaggaggccaataggctgccaatactccttggactccccgccaggtccctgctgtcagtgcgcctgcgcgcgggtccggcgccgaggttcttgactgctgtgccggacgccaggtgtagccatgcagcgagccgattccgagcagccctccaagcgtccccgttgcgatgacagcccgagaaccccctcaaacaccccttccgcagaggcagactggtccccgggcctggaactccatcccgactacaagacatggggtccggagcaggtgtgctccttcctcaggcgcggtggctttgaagagccggtgctgctgaagaacatccgagaaaatgaaatcacaggcgcattactgccttgtcttgatgagtctcgttttgaaaatcttggagtaagttccttgggggagaggaagaagctgcttagttatatccagcgattggttcaaatccacgttgatacaatgaaggtaattaatgatcctatccatggccacattgagctccaccctctcctcgtccgaatcattgatacacctcaatttcaacgtcttcgatacatcaaacagctgggaggtggttactatgtttttccaggagcttcacacaatcgatttgagcatagtctaggggtggggtatctagcaggatgtctagttcacgcactgggtgaaaaacaaccagagctgcagataagtgaacgagatgttctctgtgttcagattgctggactttgtcatgatctcggtcatgggccattttctcacatgtttgatggacgatttattccacttgctcgcccggaggtgaaatggacgcatgaacaaggctcagttatgatgtttgagcaccttattaattctaatggaattaagcctgtcatggaacaatatggtctcatccctgaagaagatatttgctttataaaggaacaaattgtaggaccacttgaatcacctgtcgaagattcattgtggccatataaagggcgtcctgaaaacaaaagcttcctttatgagatagtatctaataaaagaaatggcattgatgtggacaaatgggattattttgccagggactgccatcatcttggaatccaaaataattttgattacaagcgctttattaagtttgcccgtgtctgtgaagtagacaatgagttgcgtatttgtgctagagataaggaagttggaaatctgtatgacatgttccacactcgcaactctttacaccgtagagcttatcaacacaaagttggcaacattattgatacaatgattacagatgctttcctcaaagcagatgactacatagagattacaggtgctggaggaaaaaagtatcgcatttctacagcaattgacgacatggaagcctatactaagctgacagataacatttttctggagattttatactctactgatcccaaattgaaagacgcacgagagattttaaaacaaattgaataccgtaatctattcaagtatgtgggtgagacgcagccaacaggacaaataaagattaaaagggaggactatgaatctcttccaaaagaggttgccagtgctaaacccaaagtattgctagacgtgaaactgaaggctgaagattttatagtggatgttatcaacatggattatggaatgcaagaaaagaatccaattgatcatgttagcttctattgtaagactgcccccaacagagcaatcaggattactaaaaaccaggtttcacaacttctgccagagaaatttgcagagcagctgattcgagtatattgtaagaaggtggacagaaagagtttgtatgccgcaagacaatattttgttcagtggtgtgcagacagaaatttcaccaagccgcaggatggcgatgttatagccccactcataacacctcaaaaaaaggaatggaacgacagtacttcagtccaaaatccaactcgcctccgagaagcatccaaaagcagagtccagctttttaaagatgacccaatgtgaatgtctgtagtcagttgtttacaaactccctctcctgcacaattcatttagaggcttcaatcatagaattctgcaaattaatgacaactcatgctttaattttgtattttgaatgtacacgcatgctgaagctaagtaacttttaatcaaagaaataagatggtattaggcaaatcttactatactatgaaaagcattaccttgcctatttttaatattattaaagcctttctccttcaaaaaaaaa

SEQ ID NO: 531 - DNA, 6633 bp, Homo sapiens
  misc_feature: Incyte ID No: 267153.8
gaggggttaagtgatgggaaaatgcctgccattttcacatgctgttacaaccaggcagtaaaagtcctcagaagttaaattttaagtaatcagactggccactttccttcctctgggaatgcagttgggatggagggctctgtctctagttggaaagaagtctgaagtcccctcctgtgtggacaccagacaacaggtatcccagggccctctagttgaccagcaatactgtggaatgaagacaccctcaagtcacatttgaaatcattccgggttcttccagttcagcaccttgactgttttcctcttcactgggaaggtgctggcagcctgacggccttttaggcttcttttaagtttggggcatctgaaacccggccaaggtgcggcgggtagtgtactcattcgaaggagaatacccccaattcactagacgagcccctaattgggggtgcggtgccgggcgcgctctttcctccccctttccaccagcactgccctcagttctgcttctagccacgccctttcgcgttcacgtccagcgccctggcgggattgatttgaggacgactggactgccattgcgcctgcgcagggagcccaaggcaagagccgctaggctgccctgcccgaagggctcaactgtcagtgagcctgcgcaggaggccaataggctgccaatactccttggactccccgccagggccctgctgtcagtgcgcctgcgcgcgggtccggcgccgaggttcttgactgctgtgccggacgccaggtgtagccatgcagcgagccgattccgagcagccctccaagcgtccccgttgcgatgacagcccgagaaccccctcaaacaccccttccgcagaggcagactggtccccgggcctggaactccatcccgactacaagacatggggtccggagcaggtgtgctccttcctcaggcgcggtggctttgaagagccggtgctgctgaagaacatccgagaaaatgaaatcacaggcgcattattgccttgtcttgatgagtctcgttttgaaaatcttggagtaagttccttgggggagaggaagaagctgcttagttatatccagcgattggttcaaatccacgttgatacaatgaaggtaattaatgatcctatccatggccacattgagctccaccctctcctcgtccgaatcattgatacacctcaatttcaacgtcttcgatacatcaaacagctgggaggtggttactatgtttttccaggagcttcacacaatcgatttgagcatagtctaggggtggggtatctagcaggatgtctagttcacgcactgggtgaaaaacaaccagagctgcagataagtgaacgagatgttctctgtgttcagattgctggactttgtcatgatctcggtcatgggccattttctcacatgtttgatggacgatttattccacttgctcgcccggaggtgaaatggacgcatgaacaaggctcagttatgatgtttgagcaccttattaattctaatggaattaagcctgtcatggaacaatatggtctcatccctgaagaagatatttgctttataaaggaacaaattgtaggaccacttgaatcacctgtcgaagattcattgtggccatataaagggcgtcctgaaaacaaaagcttcctttatgagatagtatctaataaaagaaatggcattgatgtggacaaatgggattattttgccagggactgccatcatcttggaatccaaaataattttgattacaagcgctttattaagtttgcccgtgtctgtgaagtagacaatgagttgcgtatttgtgctagagataaggaagttggaaatctgtatgacatgttccacactcgcaactctttacaccgtagagcttatcaacacaaagttggcaacattattgatacaatgattacagatgctttcctcaaagcagatgactacatagagattacaggtgctggaggaaaaaagtatcgcatttctacagcaattgacgacatggaagcctatactaagctgacagataacatttttctggagattttatactctactgatcccaaattgaaagacgcacgagagattttaaaacaaattgaataccgtaatctattcaagtatgtgggtgagacgcagccaacaggacaaataaagattaaaagggaggactatgaatctcttccaaaagaggttgccagtgctaaacccaaagtattgctagacgtgaaactgaaggctgaagattttatagtggatgttatcaacatggattatggaatgcaagaaaagaatccaattgatcatgttagcttctattgtaagactgcccccaacagagcaatcaggattactaaaaaccaggtttcacaacttctgccagagaaatttgcagagcagctgattcgagtatattgtaagaaggtggacagaaagagtttgtatgccgcaagacaatattttgttcagtggtgtgcagacagaaatttcaccaagccgcaggatggcgatgttatagccccactcataacacctcaaaaaaaggaatggaacgacagtacttcagtccaaaatccaactcgcctccgagaagcatccaaaagcagagtccagctttttaaagatgacccaatgtgaatgtctgtagtcagttgtttacaaactccctctcctgcacaattcatttagaggcttcaatcatagaattctgcaaattaatgacaactcatgctttaattttgtattttgaatgtacacgcatgctgaagctaagtaacttttaatcaaagaaataagatggtattaggcaaatcttactatactatgaaaagcattaccttgcctatttttaatattattaaagcctttctccttcagtagtctattttcttagaataacaactcttttatctgattgctgaactctattttgttttcttttgtttgaagagacaaggtgtttggctgctgttcgcccaagtcttgggatctcagaactttcacttgggctcaatgcgaccactcctcgcctcagccccccaatgtagctgggactaaagtcatgtgccaccacacccagcttgactctgaactttgtatgacagatgattgttttttgtttttaatgtagaaatgagacaagggtacaaattggaactagaaattgacattgtcattgacaaacatggctaaaaacaaaacatcaaatcctgcccccgtgaagagttccctgtcacctcaagtttgaggatagtcctctaagagtgacctaagcataagtgaaagacacctcccctcacccttctagccccctacaaggtgccaggttggggtaaagagttggagatgatggccaggagtggcctccaacacgctggtgagaggcctgattaggttttggggaagatctgagagctctggcctcttcgtgagtggaacataaagccgcctcttgttgggagatcctaccccagtgacagaggaatcccccaaactaggctgtgccctggctccgtggcggctccagacccgggtagtgcctttgtcccctgaatactcactcccccggtccagagggccttcccactgcccagcctggagaaggcctcccctgacctgctctctcagtatcctggagagctggccagaggccatcacaggcatcatcctcagagctcctcagacctgggactttgtttttgctggttcagtgcattttgtgtatttaagagcaaacactagccaggcgtggcggcgtgtgcctgtagtcccagctacttgggaggctgaggcaggaggattgctcgaacctgggaggcggaggttgcagtgagcctagatcacgccattgcactccagcctgggtgacagagtgagactccatctccaaaaaaaaaagcacaaacactgcactgcctgtgctgaaattagtgaccacccagtgggctccaggctccgctaggtaacttcgttttcccagcagtggagtgggcaccaccttggtggggcagtgcccctgtgcccagggcacacctcattcccagttctatagcaattcaccaagaacaaagtctgcagttagagccaaagctggtggtggccagagggtgctgaagatacaggccagtggggatgggagccatgagccccgaatgtcttctgctctgatgctccccggactaagcctccctggcacactgggagtgaggggcagcctgagcaagtaggggaactcagaccacaggccagcagatttcccagcagtccatcactggccaccgtgtagccagattctgttccgtccacactggggtgaagagtacttggaatgtctgccatcctgtatgatcaccccaccccctgtccatccatcagtagataataagggttggttacaattcataagagaatagttaaaacacttctcctctcatgcctaccatggtgctgtatcaaggggatttgttcacatatgggctcagcaacgcacaagtgaggtcagccatggcactaggtcattcccattttagccaaggtgcctctataggggtcagacatcatgtgcccagacctaaggtcaggaatgtcatatttttctgttaaaatcattttatttctgtgtatcttacctttaaatcattgtggtttactctgagattctgtagtcctaatattgtatcattgtgctgtctgcaaaacaacttgaatctattttgtttgcatcttttgttacatgtaacgcagctgtactttatgttctttgcaactgtttccattatgagaacgctgtgctatttacaaggttacatttttcttggccaggcgaggtggtcatgcctgtaatcccagcactttgggaggccaaggtgggcggatcacttgaggtaaagagttgagaccagcctggctagcatggcgaaacccagtctctactaaaaatacaaaaattagccgggtgaaattagccgggcgtggtggtgtgtgcttgtaatcccagctactcgggaggctgaggcgggagaatcgcttgaatccgggaggcagaggttgcagtgagccaagatcaggccactgcactccagcctcggggtcaagagcgaaactctgtctcaaacaaaaagaaagaaaggaaggaaggaaggagggaaggaaggaaggaaagagagaaagaaaagaaagaaagaaagaaagaaagaaagaaagaaagaaagaaagaaagaaagaaagaaagacagggaaagaaatatctttgctatttgtataaaaatggaaattttaacagcttagcctctagagagttactgaacgtggttaccttgggaatgtaaatagaactgcaaattaaaatgactggccacttcaactgggtaagggaaacagctgcaataaagcttcgtgaatatatatctccatcttgaaagttgtgttccacaaaggtttcgacctctttgtccaaaaatgcatattactcatttactcctttcataccttcattgtgaaattaaataacagactcacaagcacctggcactggtggcagacaaaaaggcctcaacattctgcagcaggccagaggaggaacgacgctgctacagtctttattagttccagtgctcaagcccaggtttctaaggtttgacaatattctgtaagttaaaatcatttccacacatacagagtagaatcctgtttttgtaagtatacacacacacacacacacacattcatggaacattgtctggaaggatatacatgaaaatgttaagagttggggggggttgaattttaggcaattttaatttttttaacgtcttctggtttttctacaataaacatgaatcagttgtagaacctctaaaatgataatgttcatgaggttggttttcctcgttcagtagctggcgaggaacagcatagtgaaaaatcttccctttgccaggaggcaggcactagcggggaagagatgtggatttttctgagttttctaagaccctgttagcttaggtctctgtgctgcttgagtaaggtgttaagcgtctttaatccttcaaagtcacctctgcaaaagagcagtgcctgcccccacctgtatcttgggtccccaggccacaaggaggctggccagcagcctcggccaactctagggcccttcaccatctgtgtttcaaacagcacaggctgctgtgtgtcaggaaggcctgggtggcatcatgagcagggctgagtacctgttgccgcagggctgtcagctgagaagccaagcctccagctcctggatgcagaactgctcctgccgggccagcacctcgttgttgaaggtcgggcaaggggagcttcccccgcggaacaagtctccatccaaccacagcccaaaccggccactgccactgcccatcatcagtgaatccaagtctcccttcacaaagaaagagttgcttccagtccacttaaagaccttcagctgtggggagaaggagaagaggaatgtctcgccagtaccatagaagcctttgctgagtcggatagccgaggaggagaaggctccaaatatctgcccgtcctggtccctgagcaccagcagcactggcccgctgcagccctccatccgcc

SEQ ID NO: 532 - DNA, 2962 bp, Homo sapiens
  misc_feature: Incyte ID No: 383436.2
cgcggtccgacgggagcaggcccagcggccatggcccaggccggcgtcgtcggtgaggtcacccaggtgctgtgcgcgggcgggggcgccctggagttgcccgagctgcggcgccgcttgcggatgggcttgagcgccgacgcgctggagcggctgctgcggcagcgtgggcgcttcgtggtggcggtgcgggcgggcggcgcagccgcggccccggagcgcgtggtgctggccgcctcgccgctgcgcctgtgtcgcgcgcaccagggctccaagccgggctgcgtggggctctgcgcgcagctccacctctgcaggttcatggtctacggcgcctgcaagttcctgagagccgggaagaactgtaggaatagtcacagcttgacaaccgaacacaacctgagtgtgctgagaactcatggcgttgaccacctgagctataatgagctatgccaactcttgtttcagaacgacccctggcttttgccagaaatttgccaagcattacaacaaaggagatggaccccacggctcttgtgcctttcaaaagcagtgcatcaagctccatatctgccagtattttttacagggggaatgcaagtttggcactagctgtaagagatcccatgatttctctaattctgagaatctggaaaaattggagaagttgggtatgagctcagacctggtgagcaggctgcctaccatttatagaaatgcacatgacatcaagaataagagctctgcccccagcagagtgcctcctctttttgtcccacaggggacttctgaaagaaaagacagttcaggttctgtgtccccaaacactcttagccaggaggagggtgatcagatctgtttgtaccatatccggaaaagttgtagctttcaagataagtgccatagagttcatttccatttgccgtatcgatggcaattcttggatagaggcaaatgggaggatttggacaacatggaacttattgaagaggcatattgcaatcccaaaatagaaaggatcctgtgctctgagtcagccagtacctttcactctcattgtctgaactttaacgccatgacttacggtgctacccaggctcgccgcctctccacggcctcctctgtcaccaaacctccacacttcatcctcaccactgactggatttggtactggagtgatgagtttggttcttggcaggaatatggaagacagggcacggtgcaccctgtgaccactgtcagcagtagcgacgtggagaaggcctacctggcctactgtacaccggggtctgacggccaggcagccaccttgaagttccaggccggaaagcacaactacgagttagatttcaaagccttcgttcagaaaaacctggtctatggcacaactaaaaaggtttgccgcagacccaaatacgtgtctccccaggatgtgacgaccatgcaaacctgcaataccaagtttccaggcccgaagagcatcccagactattgggactcctctgccctgccagacccaggctttcagaagatcacccttagttcttcctcggaagagtatcagaaggtctggaacctctttaaccgcacgctgcctttctactttgttcagaagattgagcgagtacagaacctggccctctgggaagtctaccagtggcaaaaaggacagatgcagaagcagaacggagggaaggccgtggacgagcggcagctgttccacggcaccagcgccatttttgtggacgccatctgccagcagaactttgactggcgggtctgtggtgttcatggcacttcctacggcaaggggagctactttgcccgagatgctgcatattcccaccactacagcaaatccgacacgcagacccacacgatgttcctggcccgggtgctggtgggcgagttcgtcaggggcaatgcctcctttgtccgtccgccggccaaggagggctggagcaacgccttctatgatagctgcgtgaacagtgtgtccgacccctccatctttgtgatctttgagaaacaccaggtctacccagagtatgtcatccagtacaccacctcctccaagccctcggtcacaccctccatcctgctggccttgggctccctgttcagcagccgacagtgagcgcacaggagtgttccaggcctttcacctgctctgccttgaaatggctatttgggcctttccttttctttttaaacagaaacttttaatgaactgttctcttaacattgacctctcaatgaagttatgttcttaatctcttgctaataatgatttttacttttaagtcacttttgggttcactagtggattaaccagaagtgattgtagttgagtccagttttgctttttaataatgtgttgaagttttagtttttactctttgttgactttgctgcttattggcaccagggacagagtttctagatacaattttatggattggttttaatttttatgagtttgtctctgcagtgattcggtttctcagagtctcatggcatcatagtttttccagaatgacacagtagccaccggtggatgacagcccacgggcggcacagtcacttctgcctgttgctctgacaccaacccaggcagctctgctgtggcttctcctgggctctggcattagttggtctgtgtcacattgtcagaacaggtggctgctgtgtggtgccatcgagtccctgctggttccccttgtcctgggagggtcacccattgcccaaggaagtgcatccacctggcaggtgacctggaggagtagcttccccgaggacccccaggcttggcctgtgattgcgcaaacccacatttcctaagcacactggacacccttcgagtgtgggttttaacatccctgtgagattgaatacttgtgccacacatgtcacaaaagagtatggaaataaaagaaaatttatccgaaaaaaaaaaaaaggg

SEQ ID NO: 533 - DNA, 2710 bp, Homo sapiens
  misc_feature: Incyte ID No: 1852059CB1
  unsure 1121, 2459, 2561-2562: a, t, c, g, or other
cagagttgcaacctcagcctcgctatggctcccagcagcccccggcccgcgctgcccgcactcctggtcctgctcggggctctgttcccaggacctggcaatgcccagacatctgtgtccccctcaaaagtcatcctgccccggggaggctccgtgctggtgacatgcagcacctcctgtgaccagcccaagttgttgggcatagagaccccgttgcctaaaaaggagttgctcctgcctgggaacaaccggaaggtgtatgaactgagcaatgtgcaagaagatagccaaccaatgtgctattcaaactgccctgatgggcagtcaacagctaaaaccttcctcaccgtgtactggactccagaacgggtggaactggcacccctcccctcttggcagccagtgggcaagaaccttaccctacgctgccaggtggagggtggggcaccccgggccaacctcaccgtggtgctgctccgtggggagaaggagctgaaacgggagccagctgtgggggagcccgctgaggtcacgaccacggtgctggtgaggagagatcaccatggagccaatttctcgtgccgcactgaactggacctgcggccccaagggctggagctgtttgagaacacctcggccccctaccagctccagacctttgtcctgccagcgactcccccacaacttgtcagcccccgggtcctagaggtggacacgcaggggaccgtggtctgttccctggacgggctgttcccagtctcggaggcccaggtccacctggcactgggggaccagaggttgaaccccacagtcacctatggcaacgactccttctcggccaaggcctcagtcagtgtgaccgcagaggacgagggcacccagcggctgacgtgtgcagtaatactggggaaccagagccaggagacactgcagacagtgaccatctacagctttccggcgcccaacgtgattctgacgaagccagaggtctcagaagggaccgaggtgacagtgaagtgtgaggcccaccctagagccaaggtgacgctgaatggggttccagcccagccactgggcccgaggggccaacttctgctgaaggccaccccagaggacaacgngcgcagtttctcctgctctgcaaacctggaggtggccggccagcttatacacaagaaccagacccgggagcttcgtgtcctgtatggcccccgactggacgagagggattgtccgggaaactggacgtggccagaaaattcccagcagactccaatgtgccaggcttgggggaacccattgcccgagctcaagtgtctaaaggatggcactttcccactgcccatcggggaatcagtgactgtcactcgagatcttgagggcacctacctctgtcgggccaggagcactcaaggggaggtcacccgcgaggtgaccgtgaatgtgctctccccccggtatgagattgtcatcatcactgtggtagcagccgcagtcataatgggcactgcaggcctcagcacgtacctctataaccgccagcggaagatcaagaaatacagactacaacaggcccaaaaagggacccccatgaaaccgaacacacaagccacgcctccctgaacctatcccgggacagggcctcttcctcggccttcccatattggtggcagtggtgccacactgaacagagtggaagacatatgccatgcagctacacctaccggccctgggacgccggaggacagggcattgtcctcagtcagatacaacagcatttggggccatggtacctgcacacctaaaacactaggccacgcatctgatctgtagtcacatgactaagccaagaggaaggagcaagactcaagacatgattgatggatgttaaagtctagcctgatgagaggggaagtggtgggggagacatagccccaccatgaggacatacaactgggaaatactgaaacttgctgcctattgggtatgctgaggccccacagacttacagaagaagtggccctccatagacatgtgtagcatcaaaacacaaaggcccacacttcctgacggatgccagcttgggcactgctgtctactgaccccaacccttgatgatatgtatttattcatttgttattttaccagctatttattgagtgtcttttatgtaggctaaatgaacataggtctctggcctcacggagctcccagtcctaatcacattcaaggtcaccaggtacagttgtacaggttgtacactgcaggagagtgcctggcaaaaagatcaaatggggctgggacttctcattggccaacctgcctttccccagaaggagtgatttttctatcggcacaaaagcactatatggactggtaatggttacaggttcagagattacccagtgaggccttattcctcccttccccccaaaactgacacctttgttagccacctncccacccacatacatttctgccagtgttcacaatgacactcagcggtcatgtctggacatgagtgcccaggggaatatgccccaagctatgccttggtactnnttgtacttgtttgcaatttcacacttgggagcctttcaacttatggcagcttccaagtttttcctggcaagtggatccaggggttcatggcaaaggcaggtgggggaaggggggggcccaaggggaattttggagggggcctcccccc

SEQ ID NO: 534 - DNA, 3271 bp, Homo sapiens
  misc_feature: Incyte ID No: 1135039.22
gtgagagccaggactcagtgctgagcttggtgtcccaccgccacaaggaggcagggaagaaacccactagtcccagctcctggggtggcacagacattgcaactggccctgcctgtgggtcctaggggcccttggctaccaggaggctaagaacactgctcatgaatgacagtgagccctgaaagctctgggggtgtcacccagtcccacaagcctgcatcccctgcagtggagatgggctcagctcctggacgtgccacagacagaaagcataacatacactcgccaggaagagcctttgcctgactcagggcagctcagagtgtggggcagaaggtgaccagccagctcagggcaggagatgcagagcacagccaattacctgtggcacacagatgacctgctggggcagggggccactgccagtgtgtacaaggcccgcaacaagaaatccggagagctggttgctgtgaaggtcttcaacactaccagctacctgcggccccgcgaggtgcaggtgagggagtttgaggtcctgcggaagctgaaccaccagaacatcgtcaagctctttgcggtggaggagacgggcggaagccggcagaaggtactggtgatggagtactgctccagtgggagcctgctgagtgtgctggagagccctgagaatgcctttgggctgcctgaggatgagttcctggtggtgctgcgctgtgtggtggccggcatgaaccacctgcgggagaacggcattgtgcatcgcgacatcaagccggggaacatcatgcgcctcgtaggggaggaggggcagagcatctacaagctgacagacttcggcgctgcccgggagctggatgatgatgagaagttcgtctcggtctatgggactgaggagtacctgcatcccgacatgtatgagcgggcggtgcttcgaaagccccagcaaaaagcgttcggggtgactgtggatctctggagcattggagtgaccttgtaccatgcagccactggcagcctgcccttcatcccctttggtgggccacggcggaacaaggagatcatgtaccggatcaccacggagaagccggctggggccattgcaggtgcccagaggcgggagaacgggcccctggagtggagctacaccctccccatcacctgccagctgtcactggggctgcagagccagctggtgcccatcctggccaacatcctggaggtggagcaggccaagtgctggggcttcgaccagttctttgcggagaccagtgacatcctgcagcgagttgtcgtccatgtcttctccctgtcccaggcagtcctgcaccacatctatatccatgcccacaacacgatagccattttccaggaggccgtgcacaagcagaccagtgtggccccccgacaccaggagtacctctttgagggtcacctctgtgtcctcgagcccagcgtctcagcacagcacatcgcccacacgacggcaagcagccccctgaccctcttcagcacagccatccctaaggggctggccttcagggaccctgctctggacgtccccaagttcgtccccaaagtggacctgcaggcggattacaacactgccaagggcgtgttgggcgccggctaccaggccctgcggctggcacgggccctgctggatgggcaggagctaatgtttcgggggctgcactgggtcatggaggtgctccaggccacatgcagacggactctggaagtggcaaggacatccctcctctacctcagcagcagcctgggaactgagaggttcagcagcgtggctggaacgcctgagatccaggaactgaaggcggctgcagaactgaggtccaggctgcggactctagcggaggtcctctccagatgctcccaaaatatcacggagacccaggagagcctgagcagcctgaaccgggagctggtgaagagccgggatcaggtacatgaggacagaagcatccagcagattcagtgctgtttggacaagatgaacttcatctacaaacagttcaagaagtctaggatgaggccagggcttggctacaacgaggagcagattcacaagctggataaggtgaatttcagtcatttagccaaaagactcctgcaggtgttccaggaggagtgcgtgcagaagtatcaagcgtccttagtcacacacggcaagaggatgagggtggtgcacgagaccaggaaccacctgcgcctggttggctgttctgtggctgcctgtaacacagaagcccagggggtccaggagagtctcagcaagctcctggaagagctatctcaccagctccttcaggaccgagcaaagggggctcaggcctcgccgcctcccatagctccttaccccagccctacacgaaaggacctgcttctccacatgcaagagctctgcgaggggatgaagctgctggcatctgacctcctggacaacaaccgcatcatcgaacggctaaatagagtcccagcacctcctgatgtctgagctccatggggcacatgaggcatcctgaagcattagaatgattccaacactgctcttctgcaccatgagaccaacccagggcaagatcccatcccatcacatcagcctacctccctcctggctgctggccaggatgtcgccagcattaccttccactgcctttctccctgggaagcagcacagctgagactgggcaccaggccacctctgttgggacccacaggaaagagtgtggcagcaactgcctggctgacctttctatcttctctaggctcaggtactgctcctccatgcccatggctgggccgtggggagaagaagctctcatacgccttcccactccctctggtttataggacttcactccctagccaacaggagaggaggcctcctggggtttccccagggcagtaggtcaaacgacctcatcacagtcttccttcctcttcaagcgtttcatgttgaacacagctctctccactcccttgtgatttctgagggtcaccactgccagcctcaggcaacatagagagcctcctgttctttctatgcttggtctgactgagcctaaagttgagaaaatgggtggccaaggccagtgccagtgtcttggggcccctttggctctccctcactctctgaggctccagctggtcctgggacatgcagccaggactgtgagtctgggcacgtccaaggcctgcaccttcaagaagtggaataaatgtggcctttgcttctgaaaaaaaaaaaaaaggg

SEQ ID NO: 535 - DNA, 261 bp, Homo sapiens
  misc_feature: Incyte ID No: 006327.1
ccagagacggggtctcgcaacattgcccagacttcctttgtgttagttaataaagctttctcaactgcctcagccttgtgtgagttgaggggaggtgtcacatccagctggagtcctttctaagcagccacagcctgatcctcccacttcctcccccaagaaaacattgtgggttgatggtcataccctgaggttctggtccaaatcggactttctatgaccttctgggtctctagtgaaaactaaagactctctccagaa

SEQ ID NO: 536 - DNA, 642 bp, Homo sapiens
  misc_feature: Incyte ID No: 1307829CB1
gctgagaggcagcgaactcatctttgccagtacaggagctcgtgccgtggcccacagcccacagcccacagccatgggctgggacctgacggtgaagatgctggcgggcaacgaattccaggtgtccctgagcagctccatgtcggtgtcagagctgaaggcgcagatcacccagaagatcggcgtgcacgccttccagcagcgtctggctgtccacccgagcggtgtggcgctgcaggacagggtcccccttgccagccagggcctgggccccggcagcacggtcctgctggtggtggacaaatgcgacgaacctctgagcatcctggtgaggaataacaagggccgcagcagcacctacgaggtgcggctgacgcagaccgtggcccacctgaagcagcaagtgagcgggctggagggtgtgcaggacgacctgttctggctgaccttcgaggggaagcccctggaggaccagctcccgctgggggagtacggcctcaagcccctgagcaccgtgttcatgaatctgcgcctgcggggaggcggcacagagcctggcgggcggagctaagggcctccaccagcatccgagcaggatcaagggccggaaataaaggctgttgtaaagagaaaaaaaaaaaa

SEQ ID NO: 537 - DNA, 833 bp, Homo sapiens
  misc_feature: Incyte ID No: 028536.19
gaggaacactcctactcccctcccctacttccaggtcccattttcagtgcccaagatccccctggtattccgaggacacacccagcaggacccggaagtgcctatgtctttagtttccaatttgcggatccactgccctctgcttgcgggctctgctctgatcacctttgatgaccccaaagtggctgagcaggtgctgcaacaaaaggagcacacgatcaacatggaggagtgccggctgcgggtgcaggtccagcccttggagctgcccatggtcaccaccatccaggtgtccagccagttgagtggccggagggtgttggtcactggatttcctgccagcctcaggctgagtgaggaggagctgctggacaagctagagatcttctttggcaagactaggaacggaggtggcgatgtggacgttcgggagctactgccagggagtgtcatgctggggtttgctagggatggagtggctcagcgtctgtgccaaatcggccagttcacagtgccactgggtgggcagcaagtccctctgagagtctctccgtatgtgaatggggagatccagaaggctgagatcaggtcgcagccagttccccgctcggtactggtgctcaacattcctgatatcttggatggcccggagctgcatgacgtcctggagatccacttccagaagcccacccgcgggggcggggaggtagaggccctgacagtcgtaccccaaggacagcagggcctagcagtcttcacctctgagtcaggctaggggcctccccttctcatcctccccacccaccccgcaaggttctcacactggcgtgggc

SEQ ID NO: 538 - DNA, 1218 bp, Homo sapiens
  misc_feature: Incyte ID No: 028536.16
cccaagcgtccgcgcaaatgaaagtggaagcaaacagcctgcgagcagagcctcctgaggtgtatttcgggtcttgctggggctgagagagaccacagccctttggggggtacaaacaagagttcagttgctgtgaattctgccactgtggcccagctctgaagcctcagctcttgccaaacagacccgagacccatgtcagccccactggatgccgccctccacgcccttcaggaggagcaggccagactcaagatgaggctgtgggacctgcagcagctgagaaaggagctcggggactcccccaaagacaaggtcccattttcagtgcccaagatccccctggtattccgaggacacacccagcaggacccggaagtgcctaagtctttagtttccaatttgcggatccactgccctctgcttgcgggctctgctctgatcacctttgatgaccccaaagtggctgagcaggtgctgcaacaaaaggagcacacgatcaacatggaggagtgccggctgcgggtgcaggtccagcccttggagctgcccatggtcaccaccatccaggtgatggtgtccagccagttgagtggccggagggtgttggtcactggatttcctgccagcctcaggctgagtgaggaggagctgctggacaagctagagatcttctttggcaagactaggaacggaggtggcgatgtggacgttcgggagctactgccagggagtgtcatgctggggtttgctagggatggagtggctcagcgtctgtgccaaatcggccagttcacagtgccactgggtgggcagcaagtccctctgagagtctctccgtatgtgaatggggagatccagaaggctgagatcaggtcgcagccagttccccgctcggtactggtgctcaacattcctgatatcttggatggcccggagctgcatgacgtcctggagatccacttccagaagcccacccgcgggggcggggaggtagaggccctgacagtcgtaccccaaggacagcagggcctagcagtcttcacctctgagtcaggctaggggcctccccttctcatcctccccacccccccgccaaggttctcacactggcctgggcttgggtgcccatataggaggtctgtatgttcaccaacagtgcggaggggtcacacattgcaaaacactgcccagaacagtaaaaagagcctgcatgcc

SEQ ID NO: 539 - DNA, 864 bp, Homo sapiens
  misc_feature: Incyte ID No: 028536.18
  unsure 88-89, 538, 602: a, t, c, g, or other
ctgaggtgtatttcgggtcttgctggggctgagagagaccacagccctttggggggtacaaacaagagttcagttgctgtgaattctnnccactgtgcccagctctgaagcctcagctcttgccaaacagacccgagacccatgtcagccccactggatgccgccctccacgcccttcaggaggagcaggccagactcaagatgaggctgtgggacctgcagcagctgagaaaggagctcggggactcccccaaagacaagtaaatgtatttatctccggcactcagcatcaatggaatggaatcggagatgccttcctcctaggtgggagtgaggaacactcctactcccctcccctacttccaggtcccattttcagtgcccaagatccccctggtattccgaggacacacccagcaggacccggaagtgcctaagtctttagtttccaatttgcggatccactgccctctgcttgcgggctctgctctgatcacctttgatgaccccaaaggtaagctcatggggagcctcaggngggaggtggggagggttcccagtactaaccctgtttcccaccacccagtggctgagcaggtgcngcaacaaaaggagcacacgatcaacatggaggagtgccggctgcgggtgcaggtccagcccttggagctgcccatggtcaccaccatccaggtgatggtatgacagaatcctggggcatgcaaagcatgcaacgcacctgggcatggggaagtggagctgtgtctgggaccaccccttgctgtctccccctaggtgtccagccagttgagtggccggagcgtgttggtcactggatttcctgccagcctcaggctgagtgag

SEQ ID NO: 540 - DNA, 2855 bp, Homo sapiens
  misc_feature: Incyte ID No: 253534.21
gggtctgtgagtttcatttcttcgcggcgcggggcggggctgggcgcggggtgaaagaggcgaagcgagagcggaggccgcactccagcactgcgcagggaccgccttggaccgcagttgccggccaggaatcccagtgtcacggtggacacgcctccctcgcgcccttgccgcccacctgctcacccagctcaggggctttggaattctgtggccacactgcgaggagatcggttctgggtcggaggctacaggaagactcccactccctgaaatctggagtgaagaacgccgccatccagccaccattccaaggaggtgcaggagaacagctctgtgataccatttaacttgttgacattacttttatttgaaggaacgtatattagagcttactttgcaaagaaggaagatggttgtttccgaagtggacatcgcaaaagctgatccagctgctgcatcccaccctctattactgaatggagatgctactgtggcccagaaaaatccaggctcggtggctgagaacaacctgtgcagccagtatgaggagaaggtgcgcccctgcatcgacctcattgactccctgcgggctctaggtgtggagcaggacctggccctgccagccatcgccgtcatcggggaccagagctcgggcaagagctccgtgttggaggcactgtcaggagttgcccttcccagaggcagcgggatcgtgaccagatgcccgctggtgctgaaactgaagaaacttgtgaacgaagataagtggagaggcaaggtcagttaccaggactacgagattgagatttcggatgcttcagaggtagaaaaggaaattaataaagcccagaatgccatcgccggggaaggaatgggaatcagtcatgagctaatcaccctggagatcagctcccgagatgtcccggatctgactctaatagaccttcctggcataaccagagtggctgtgggcaatcagcctgctgacattgggtataagatcaagacactcatcaagaagtacatccagaggcaggagacaatcagcctggtggtggtccccagtaatgtggacatcgccaccacagaggctctcagcatggcccaggaggtggaccccgagggagacaggaccatcggaatcttgacgaagcctgatctggtggacaaaggaactgaagacaaggttgtggacgtggtgcggaacctcgtgttccacctgaagaagggttacatgattgtcaagtgccggggccagcaggagatccaggaccagctgagcctgtccgaagccctgcagagagagaagatcttctttgagaaccacccatatttcagggatctgctggaggaaggaaaggccacggttccctgcctggcagaaaaacttaccagcgagctcatcacacatatctgtaaatctctgcccctgttagaaaatcaaatcaaggagactcaccagagaataacagaggagctacaaaagtatggtgtcgacataccggaagacgaaaatgaaaaaatgttcttcctgatagataaaattaatgcctttaatcaggacatcactgctctcatgcaaggagaggaaactgtaggggaggaagacattcggctgtttaccagactccgacacgagttccacaaatggagtacaataattgaaaacaattttcaagaaggccataaaattttgagtagaaaaatccagaaatttgaaaatcagtatcgtggtagagagctgccaggctttgtgaattacaggacatttgagacaatcgtgaaacagcaaatcaaggcactggaagagccggctgtggatatgctacacaccgtgacggatatggtccggcttgctttcacagatgtttcgataaaaaattttgaagagttttttaacctccacagaaccgccaagtccaaaattgaagacattagagcagaacaagagagagaaggtgagaagctgatccgcctccacttccagatggaacagattgtctactgccaggaccaggtatacaggggtgcgttgcagaaggtcagagagaaggagctggaagaagaaaagaagaagaaatcctgggattttggggctttccagtccagctcggcaacagactcttccatggaggagatctttcagcacctgatggcctatcaccaggaggccagcaagcgcatctccagccacatccctttgatcatccagttcttcatgctccagacgtacggccagcagcttcagaaggccatgctgcagctcctgcaggacaaggacacctacagctggctcctgaaggagcggagcgacaccagcgacaagcggaagttcctgaaggagcggcttgcacggctgacgcaggctcggcgccggcttgcccagttccccggttaaccacactctgtccagccccgtagacgtgcacgcacactgtctgcccccgttcccgggtagccactggactgacgacttgagtgctcagtagtcagactggatagtccgtctctgcttatccgttagccgtggtgatttagcaggaagctgtgagagcagtttggtttctagcatgaagacagagccccaccctcagatgcacatgagctggcgggattgaaggatgctgtcttcgtactgggaaagggattttcagccctcagaatcgctccaccttgcagctctccccttctctgtattcctagaaactgacacatgctgaacatcacagcttatttcctcatttttataatgtcccttcacaaacccagtgttttaggagcatgagtgccgtgtgtgtgcgtcctgtcggagccctgtctcctctctctgtaataaactcatttctagcccg

SEQ ID NO: 541 - DNA, 2920 bp, Homo sapiens
  misc_feature: Incyte ID No: 253534.20
ggtgagtgtcgcttctgggggcagcgcccagtaaccgcgctaggagcgcggagaagggcattgggagagcggcgttcgtggcggagactagcgctccggagcacgggcacgacgggggcaccttctcggctgctaccttggaccgcagttgccggccaggaatcccagtgtcacggtggacacgcctccctcgcgcccttgccgcccacctgctcacccagctcaggggctttggaattctgtggccacactgcgaggagatcggttctgggtcggaggctacaggaagactcccactccctgaaatctggagtgaagaacgccgccatccagccaccattccaaggaggtgcaggagaacagctctgtgataccatttaacttgttgacattacttttatttgaaggaacgtatattagaggcatctgctttattttaagcttactttgcaaagaaggaagatggttgtttccgaagtggacatcgcaaaagctgatccagctgctgcatcccaccctctattactgaatggagatgctactgtggcccagaaaaatccaggctcggtggctgagaacaacctgtgcagccagtatgaggagaaggtgcgcccctgcatcgacctcattgactccctgcgggctctaggtgtggagcaggacctggccctgccagccatcgccgtcatcggggaccagagctcgggcaagagctccgtgttggaggcactgtcaggagttgcccttcccagaggcagcgggatcgtgaccagatgcccgctggtgctgaaactgaagaaacttgtgaacgaagataagtggagaggcaaggtcagttaccaggactacgagattgagatttcggatgcttcagaggtagaaaaggaaattaataaagcccagaatgccatcgccggggaaggaatgggaatcagtcatgagctaatcaccctggagatcagctcccgagatgtcccggatctgactctaatagaccttcctggcataaccagagtggctgtgggcaatcagcctgctgacattgggtataagatcaagacactcatcaagaagtacatccagaggcaggagacaatcagcctggtggtggtccccagtaatgtggacattgccaccacagaggctctcagcatggcccaggaggtggaccccgagggagacaggaccatcggaatcttgacgaagcctgatctggtggacaaaggaactgaagacaaggttgtggacgtggtgcggaacctcgtgttccacctgaagaagggttacatgattgtcaagtgccggggccagcaggagatccaggaccagctgagcctgtccgaagccctgcagagagagaagatcttctttgagaaccacccatatttcagggatctgctggaggaaggaaaggccacggttccctgcctggcagaaaaacttaccagcgagctcatcacacatatctgtaaatctctgcccctgttagaaaatcaaatcaaggagactcaccagagaataacagaggagctacaaaagtatggtgtcgacataccggaagacgaaaatgaaaaaatgttcttcctgatagataaaattaatgcctttaatcaggacatcactgctctcatgcaaggagaggaaactgtaggggaggaagacattcggctgtttaccagactccgacacgagttccacaaatggagtacaataattgaaaacaattttcaagaaggccataaaattttgagtagaaaaatccagaaatttgaaaatcagtatcgtggtagagagctgccaggctttgtgaattacaggacatttgagacaatcgtgaaacagcaaatcaaggcactggaagagccggctgtggatatgctacacaccgtgacggatatggtccggcttgctttcacagatgtttcgataaaaaattttgaagagttttttaacctccacagaaccgccaagtccaaaattgaagacattagagcagaacaagagagagaaggtgagaagctgatccgcctccacttccagatggaacagattgtctactgccaggaccaggtatacaggggtgcattgcagaaggtcagagagaaggagctggaagaagaaaagaagaagaaatcctgggattttggggctttccaatccagctcggcaacagactcttccatggaggagatctttcagcacctgatggcctatcaccaggaggccagcaagcgcatctccagccacatccctttgatcatccagttcttcatgctccagacgtacggccagcagcttcagaaggccatgctgcagctcctgcaggacaaggacacctacagctggctcctgaaggagcggagcgacaccagcgacaagcggaagttcctgaaggagcggcttgcacggctgacgcaggctcggcgccggcttgcccagttccccggttaaccacactctgtccagccccgtagacgtgcacgcacactgtctgcccccgttcccgggtagccactggactgacgacttgagtgctcagtagtcagactggatagtccgtctctgcttatccgttagccgtggtgatttagcaggaagctgtgagagcagtttggtttctagcatgaagacagagccccaccctcagatgcacatgagctggcgggattgaaggatgctgtcttcgtactgggaaagggattttcagccctcagaatcgctccaccttgcagctctccccttctctgtattcctagaaactgacacatgctgaacatcacagcttatttcctcatttttataatgtcccttcacaaacccagtgttttaggagcatgagtgccgtgtgtgtgcgtcctgtcggagccctgtctcctctctctgtaataaactcatttctagcagaaaaaaaaaaaaggcg

SEQ ID NO: 542 - DNA, 1866 bp, Homo sapiens
  misc_feature: Incyte ID No: 258971CB1
  unsure 1776: a, t, c, g, or other
ccagatctcagaggagcctggctaagcaaaaccctgcagaacggctgcctaatttacagcaaccatgagtacaaatggtgatgatcatcaggtcaaggatagtctggagcaattgagatgtcactttacatgggagttatccattgatgacgatgaaatgcctgatttagaaaacagagtcttggatcagattgaattcctagacaccaaatacagtgtgggaatacacaacctactagcctatgtgaaacacctgaaaggccagaatgaggaagccctgaagagcttaaaagaagctgaaaacttaatgcaggaagaacatgacaaccaagcaaatgtgaggagtctggtgacctggggcaactttgcctggatgtattaccacatgggcagactggcagaagcccagacttacctggacaaggtggagaacatttgcaagaagctttcaaatcccttccgctatagaatggagtgtccagaaatagactgtgaggaaggatgggccttgctgaagtgtggaggaaagaattatgaacgggccaaggcctgctttgaaaaggtgcttgaagtggaccctgaaaaccctgaatccagcgctgggtatgcgatctctgcctatcgcctggatggctttaaattagccacaaaaaatcacaagccattttctttgcttcccctaaggcaggctgtccgcttaaatccagacaatggatatattaaggttctccttgccctgaagcttcaggatgaaggacaggaagctgaaggagaaaagtacattgaagaagctctagccaacatgtcctcacagacctatgtctttcgatatgcagccaagttttaccgaagaaaaggctctgtggataaagctcttgagttattaaaaaaggccttgcaggaaacacccacttctgtcttactgcatcaccagatagggctttgctacaaggcacaaatgatccaaatcaaggaggctacaaaagggcagcctagagggcagaacagagaaaagctagacaaaatgataagatcagccatatttcattttgaatctgcagtggaaaaaaagcccacatttgaggtggctcatctagacctggcaagaatgtatatagaagcaggcaatcacagaaaagctgaagagaattttcaaaaattgttatgcatgaaaccagtggtagaagaaacaatgcaagacatacatttccactatggtcggtttcaggaatttcaaaagaaatctgacgtcaatgcaattatccattatttaaaagctataaaaatagaacaggcatcattaacaagggataaaagtatcaattctttgaagaaattggttttaaggaaacttcggagaaaggcattagatctggaaagcttgagcctccttgggttcgtctacaaattggaaggaaatatgaatgaagccctggagtactatgagcgggccctgagactggctgctgactttgagaactctgtgagacaaggtccttaggcacccagatatcagccactttcacatttcatttcattttatgctaacatttactaatcatcttttctgcttactgttttcagaaacattataattcactgtaatgatgtaattcttgaataataaatctgacaaaatattagttgtgttcaacaattagtgaaacagaatgtgtgtatgcatgtaagaaagagaaatcatttgtatgagtgctatgtagtagagaaaaaatgttagttaactttgtaggaaataaaacattggacttacactanaagagagggagggggggggggaaggagggggaggagggaggcgggaggggggggaggggggagaagggaaaaaaaagggggggccctctt

SEQ ID NO: 543 - DNA, 1824 bp, Homo sapiens
  misc_feature: Incyte ID No: 238756.2
ctgtcttggggtttaaacgtaactgaaaatccacaagacagaatagccagatctcagaggagcctggctaagcaaaaccctgcagaacggctgcctaatttacagcaaccatgagtacaaatggtgatgatcatcaggtcaaggatagtctggagcaattgagatgtcactttacatgggagttatccattgatgacgatgaaatgcctgatttagaaaacagagtcttggatcagattgaattcctagacaccaaatacagtgtgggaatacacaacctactagcctatgtgaaacacctgaaaggccagaatgaggaagccctgaagagcttaaaagaagctgaaaacttaatgcaggaagaacatgacaaccaagcaaatgtgaggagtctggtgacctggggcaactttgcctggatgtattaccacatgggcagactggcagaagcccagacttacctggacaaggtggagaacatttgcaagaagctttcaaatcccttccgctatagaatggagtgtccagaaatagactgtgaggaaggatgggccttgctgaagtgtggaggaaagaattatgaacgggccaaggcctgctttgaaaaggtgcttgaagtggaccctgaaaaccctgaatccagcgctgggtatgcgatctctgcctatcgcctggatggctttaaattagccacaaaaaatcacaagccattttctttgcttcccctaaggcaggctgtccgcttaaatccagacaatggatatattaaggttctccttgccctgaagcttcaggatgaaggacaggaagctgaaggagaaaagtacattgaagaagctctagccaacatgtcctcacagacctatgtctttcgatatgcagccaagttttaccgaagaaaaggctctgtggataaagctcttgagttattaaaaaaggccttgcaggaaacacccacttctgtcttactgcatcaccagatagggctttgctacaaggcacaaatgatccaaatcaaggaggctacaaaagggcagcctagagggcagaacagagaaaagctagacaaaatgataagatcagccatatttcattttgaatctgcagtggaaaaaaagcccacatttgaggtggctcatctagacctggcaagaatgtatatagaagcaggcaatcacagaaaagctgaagagaattttcaaaaattgttatgcatgaaaccagtggtagaagaaacaatgcaagacatacatttccactatggtcggtttcaggaatttcaaaagaaatctgacgtcaatgcaattatccattatttaaaagctataaaaatagaacaggcatcattaacaagggataaaagtatcaattctttgaagaaattggttttaaggaaacttcggagaaaggcattagatctggaaagcttgagcctccttgggttcgtctacaaattggaaggaaatatgaatgaagccctggagtactatgagcgggccctgagactggctgctgactttgagaactctgtgagacaaggtccttaggcacccagatatcagccactttcacatttcatttcattttatgctaacatttactaatcatcttttctgcttactgttttcagaaacattataattcactgtaatgatgtaattcttgaataataaatctgacaaaatattagttgtgttcaacaattagtgaaacagaatgtgtgtatgcatgtaagaaagagaaatcatttgtatgagtgctatgtagtagagaaaaaatgttagttaactttgtaggaaataaaacattggacttacaaaaaaa

SEQ ID NO: 544 - DNA, 1541 bp, Homo sapiens
  misc_feature: Incyte ID No: 153119CB1
cacgcgtccgaaaacagcgagggagaaactggcagataccaaacctcttcgaggcacaaggcacaacaggctgctctgggattctcttcagccaatcttcattgctcaagtgtctgaagcagccatggcagaagtacctgagctcgccagtgaaatgatggcttattacagtggcaatgaggatgacttgttctttgaagctgatggccctaaacagatgaagtgctccttccaggacctggacctctgccctctggatggcggcatccagctacgaatctccgaccaccactacagcaagggcttcaggcaggccgcgtcagttgttgtggccatggacaagctgaggaagatgctggttccctgcccacagaccttccaggagaatgacctgagcaccttctttcccttcatctttgaagaagaacctatcttcttcgacacatgggataacgaggcttatgtgcacgatgcacctgtacgatcactgaactgcacgctccgggactcacagcaaaaaagcttggtgatgtctggtccatatgaactgaaagctctccacctccagggacaggatatggagcaacaagtggtgttctccatgtcctttgtacaaggagaagaaagtaatgacaaaatacctgtggccttgggcctcaaggaaaagaatctgtacctgtcctgcgtgttgaaagatgataagcccactctacagctggagagtgtagatcccaaaaattacccaaagaagaagatggaaaagcgatttgtcttcaacaagatagaaatcaataacaagctggaatttgagtctgcccagttccccaactggtacatcagcacctctcaagcagaaaacatgcccgtcttcctgggagggaccaaaggcggccaggatataactgacttcaccatgcaatttgtgtcttcctaaagagagctgtacccagagagtcctgtgctgaatgtggactcaatccctagggctggcagaaagggaacagaaaggtttttgagtacggctatagcctggactttcctgttgtctacaccaatgcccaactgcctgccttagggtagtgctaagaggatctcctgtccatcagccaggacagtcagctctctcctttcagggccaatccccagcccttttgttgagccaggcctctctcacctctcctactcacttaaagcccgcctgacagaaaccacggccacatttggttctaagaaaccctctgtcattcgctcccacattctgatgagcaaccgcttccctatttatttatttatttgtttgtttgttttattcattggtctaatttattcaaagggggcaagaagtagcagtgtctgtaaaagagcctagtttttaatagctatggaatcaattcaatttggactggtgtgctctctttaaatcaagtcctttaattaagactgaaaatatataagctcagattatttaaatgggaatatttataaatgagcaaatatcatactgttcaatggttctgaaataaacttcactgaagaaaaaa

SEQ ID NO: 545 - DNA, 845 bp, Homo sapiens
  misc_feature: Incyte ID No: 241888.14
gtcctattgagaaccacggttacctatattatgtattaatattgagttgagcaaggtaactcagacaattccactccttgtagtatttcattgacaagcctcagatttgtcattaattcctgtctggtttaaagataccctgattatagaccaggcatgtataacttatttatatatttctgttaattctttctgaaggcaatttctatgctggagagtcttagcttgcctactataaataacactgtggtatcacagaggattatgcaatattgaccagataaaaataccatgaagatgttgatattgtacaaaaagaactctaactctttatataggaagtcgttcaatgttgtcagttatgactgttttttaaaacaaagaactaactgaggtcaagggctaggagaatattcaggaatgagttcactagaaacatgatgccttccatagtctccaaataatcatattggaattagaaaggaagtagctggcagagctgtgcctgttgataaaatcaatccttaatcactttttcccccaacaggtgcagttttgccaaggagtgctaaagaacttagatgtcagtgcataaagacatactccaaacctttccaccccaaatttatcaaagaactgagagtgattgagagtggaccacactgcgccaacacagaaattatgtaagtactttaaaaaagattagatattttgttttagcaaacttaaaattaaggaaggtggaaatatttaggaaagttccaggtgttaggattacagtagtaaatgaaacaaaacaaaataaaaaatatttgtctacatgacatttaaatatggtagcttcc

SEQ ID NO: 546 - DNA, 3439 bp, Homo sapiens
  misc_feature: Incyte ID No: 3420843CB1
agaggcctggaggaggcagaggccaggagggagaggtcccaagagcctgtgaaatgggtctggcctgggtcccagctgggcaggaacacaggacttcaggacactaaggaccctgtcatgcccatggccagcacccaccagtgctggtgcctgcctgtccagagctgaccagggagatggtgctggcccaggggctgctctccatggccctgctggccctgtgctgggagcgcagcctggcaggggcagaagaaaccatcccgctgcagaccctgcgctgctacaacgactacaccagccacatcacctgcaggtgggcagacacccaggatgcccagcggctcgtcaacgtgaccctcattcgccgggtgaatgaggacctcctggagccagtgtcctgtgacctcagtgatgacatgccctggtcagcctgcccccatccccgctgcgtgcccaggagatgtgtcattccctgccagagttttgtcgtcactgacgttgactacttctcattccaaccagacaggcctctgggcacccggctcaccgtcactctgacccagcatgtccagcctcctgagcccagggacctgcagatcagcaccgaccaggaccacttcctgctgacctggagtgtggcccttgggagtccccagagccactggttgtccccaggggatctggagtttgaggtggtctacaagcggcttcaggactcttgggaggacgcagccatcctcctctccaacacctcccaggccaccctggggccagagcacctcatgcccagcagcacctacgtggcccgagtacggacccgcctggccccaggttctcggctctcaggacgtcccagcaagtggagcccagaggtttgctgggactcccagccaggggatgaggcccagccccagaacctggagtgcttctttgacggggccgccgtgctcagctgctcctgggaggtgaggaaggaggtggccagctcggtctcctttggcctattctacaagcccagcccagatgcaggggaggaagagtgctccccagtgctgagggaggggctcggcagcctccacaccaggcaccactgccagattcccgtgcccgaccccgcgacccacggccaatacatcgtctctgttcagccaaggagggcagagaaacacataaagagctcagtgaacatccagatggcccctccatccctcaacgtgaccaaggatggagacagctacagcctgcgctgggaaacaatgaaaatgcgatacgaacacatagaccacacatttgagatccagtacaggaaagacacggccacgtggaaggacagcaagaccgagaccctccagaacgcccacagcatggccctgccagccctggagccctccaccaggtactgggccagggtgagggtcaggacctcccgcaccggctacaacgggatctggagcgagtggagtgaggcgcgctcctgggacaccgagtcggtgctgcctatgtgggtgctggccctcatcgtgatcttcctcaccatcgctgtgctcctggccctccgcttctgtggcatctacgggtacaggctgcgcagaaagtgggaggagaagatccccaaccccagcaagagccacctgttccagaacgggagcgcagagctttggcccccaggcagcatgtcggccttcactagcgggagtcccccacaccaggggccgtggggcagccgcttccctgagctggagggggtgttccctgtaggattcggggacagcgaggtgtcacctctcaccatagaggaccccaagcatgtctgtgatccaccatctgggcctgacacgactccagctgcctcagatctacccacagagcagccccccagcccccagccaggcccgcctgccgcctcccacacacctgagaaacaggcttccagctttgacttcaatgggccctacctggggccgccccacagccgctccctacctgacatcctgggccagccggagcccccacaggagggtgggagccagaagtccccacctccagggtccctggagtacctgtgtctgcctgctggggggcaggtgcaactggtccctctggcccaggcgatgggaccgggacaggccgtggaagtggagagaaggccgagccagggggctgcagggagtccctccctggagtccgggggaggccctgcccctcctgctcttgggccaagggtgggaggacaggaccaaaaggacagccctgtggctatacccatgagctctggggacactgaggaccctggagtggcctctggttatgtctcctctgcagacctggtattcaccccaaactcaggggcctcgtctgtctccctagttccctctctgggcctcccctcagaccagacccccagcttatgtcctgggctggccagtggaccccctggagccccaggccctgtgaagtcagggtttgagggctatgtggagctccctccaattgagggccggtcccccaggtcaccaaggaacaatcctgtcccccctgaggccaaaagccctgtcctgaacccaggggaacgcccggcagatgtgtccccaacatccccacagcccgagggcctccttgtcctgcagcaagtgggcgactattgcttcctccccggcctggggcccggccctctctcgctccggagtaaaccttcttccccgggacccggtcctgagatcaagaacctagaccaggcttttcaagtcaagaagcccccaggccaggctgtgccccaggtgcccgtcattcagctcttcaaagccctgaagcagcaggactacctgtctctgcccccttgggaggtcaacaagcctggggaggtgtgttgagacccccaggcctagacaggcaaggggatggagagggcttgccttccctcccgcctgaccttcctcagtcatttctgcaaagccaaggggcagcctcctgtcaaggtagctagaggcctgggaaaggagatagccttgctccggcccccttgaccttcagcaaatcacttctctccctgcgctcacacagacacacacacacacacgtacatgcacacatttttcctgtcaggttaacttatttgtaggttctgcattattagaactttctagatatactcattccatctccccctcatttttttaatcaggtttccttgcttttgccatttttcttccttcttttttcactgatttattatgagagtggggctgaggtctgagctgagccttatcagactgagatgcggctggttgtgttgaggacttgtgtgggctgcctgtccccggcagtcgctgatgcacatgacatgattctcatctgggtgcagaggtgggaggcaccaggtgggcacccgtgggggttagggcttggaagagtggcacaggactgggcacgctcagtgagg

SEQ ID NO: 547 - DNA, 1183 bp, Homo sapiens
  misc_feature: Incyte ID No: 215581.2
ttagagtctcaacccccaataaatataggactggagatgtctgaggctcattctgccctcgagcccaccgggaacgaaagagaagctctatctcccctgccaggagcccagctatgaactccttctccacaagcgccttcggtccagttgccttctccctggggctgctcctggtgttgcctgctgccttccctgccccagtacccccaggagaagattccaaagatgtagccgccccacacagacagccactcacctcttcagaacgaattgacaaacaaattcggtacatcctcgacggcatctcagccctgagaaaggagacatgtaacaagagtaacatgtgtgaaagcagcaaagaggcactgggcagaaaacaacctgaaccttccaaagatggctgaaaaagatggatgcttccaatctggattcaatgaggagacttgcctggtgaaaatcatcactggtcttttggagtttgaggtatacctagagtacctccagaacagatttgagagtagtgaggaacaagccagagctgtgcagatgagtacaaaagtcctgatccagttcctgcagaaaaaggcaaagaatctagatgcaataaccacccctgacccaaccacaaatgccagcctgctgacgaagctgcaggcacagaaccagtggctgcaggacatgacaactcatctcattctgcgcagctttaaggagttcctgcagtccagcctgagggctcttcggcaaatgtagcatgggcacctcagattgttgttgttaatgggcattccttcttctggtcagaaacctgtccactgggcacagaacttatgttgttctctatggagaactaaaagtatgagcgttaggacactattttaattatttttaatttattaatatttaaatatgtgaagctgagttaatttatgtaagtcatatttatatttttaagaagtaccacttgaaacattttatgtattagttttgaaataataatggaaagtggctatgcagtttgaatatcctttgtttcagagccagatcatttcttggaaagtgtaggcttacctcaaataaatggctaacttatacatatttttaaagaaatatttatattgtatttatataatgtataaatggtttttataccaataaatggcattttaaaaaattcagcaac

SEQ ID NO: 548 - DNA, 2722 bp, Homo sapiens
  misc_feature: Incyte ID No: 2835028CB1
catacacactggctcacacatctactctctctctctatctctctcagaatgacaattctaggtacaacttttggcatggttttttctttacttcaagtcgtttctggagaaagtggctatgctcaaaatggagacttggaagatgcagaactggatgactactcattctcatgctatagccagttggaagtgaatggatcgcagcactcactgacctgtgcttttgaggacccagatgtcaacaccaccaatctggaatttgaaatatgtggggccctcgtggaggtaaagtgcctgaatttcaggaaactacaagagatatatttcatcgagacaaagaaattcttactgattggaaagagcaatatatgtgtgaaggttggagaaaagagtctaacctgcaaaaaaatagacctaaccactatagttaaacctgaggctccttttgacctgagtgtcatctatcgggaaggagccaatgactttgtggtgacatttaatacatcacacttgcaaaagaagtatgtaaaagttttaatgcatgatgtagcttaccgccaggaaaaggatgaaaacaaatggacgcatgtgaatttatccagcacaaagctgacactcctgcagagaaagctccaaccggcagcaatgtatgagattaaagttcgatccatccctgatcactattttaaaggcttctggagtgaatggagtccaagttattacttcagaactccagagatcaataatagctcaggggagatggatcctatcttactaaccatcagcattttgagttttttctctgtcgctctgttggtcatcttggcctgtgtgttatggaaaaaaaggattaagcctatcgtatggcccagtctccccgatcataagaagactctggaacatctttgtaagaaaccaagaaaaaatttaaatgtgagtttcaatcctgaaagtttcctggactgccagattcatagggtggatgacattcaagctagagatgaagtggaaggttttctgcaagatacgtttcctcagcaactagaagaatctgagaagcagaggcttggaggggatgtgcagagccccaactgcccatctgaggatgtagtcatcactccagaaagctttggaagagattcatccctcacatgcctggctgggaatgtcagtgcatgtgacgcccctattctctcctcttccaggtccctagactgcagggagagtggcaagaatgggcctcatgtgtaccaggacctcctgcttagccttgggactacaaacagcacgctgccccctccattttctctccaatctggaatcctgacattgaacccagttgctcagggtcagcccattcttacttccctgggatcaaatcaagaagaagcatatgtcaccatgtccagcttctaccaaaaccagtgaagtgtaagaaacccagactgaacttaccgtgagcgacaaagatgatttaaaagggaagtctagagttcctagtctccctcacagcacagagaagacaaaattagcaaaaccccactacacagtctgcaagattctgaaacattgctttgaccactcttcctgagttcagtggcactcaacatgagtcaagagcatcctgcttctaccatgtggatttggtcacaaggtttaaggtgacccaatgattcagctatttaaaaaaaaaagaggaaagaatgaaagagtaaaggaaatgattgaggagtgaggaaggcaggaagagagcatgagaggaaagacagacaggaaaataaaaaatgatagttgccattattaggatttaatatatatccagtgctttgcaagtgctctgcgcaccttgtctcactccatcctgacaataatcctgggaggtgtgtgcaattactacgactactctcttttttatagatcattaaattcagaactaaggagttaagtaacttgtccaagttgttcacacagtgaagggaggggccaagatatgatggctgggagtctaattgcagttccctgagccatgtgcctttctcttcactgaggactgccccattcttgagtgccaaacgtcactagtaacagggtgtgcctagataatttatgatccaaactgagtcagtttggaaagtgaaagggaaacttacatataatccctccgggacaatgagcaaaaactaggactgtccccagacaaatgtgaacatacatatcatcacttaaattaaaatggctatgagaaagaaagagggggagaaacagtcttgcgggtgtgaagtcccatgaccagccatgtcaaaagaaggtaaagaagtcaagaaaaagccatgaagcccatttgatttcatttttctgaaaataggctcaagagggaataaattagaaactcacaatttctcttgtttgttaccaagacagtgattctcttgctgctaccacccaactgcatccgtccatgatctcagaggaaactgtcgctgaccctggacatgggtacgtttgacgagtgagaggaggcatgacccctcccatgtgtatagacactaccccaacctaaattcatccctaaattgtcccaagttctccagcaatagaggctgccacaaacttcagggagaaagagttacaagtacatgcaatgagtgaactgactgtggctacattcttgaagatatacgggagagacgtattattaatgcttggcatatatcatcttgcc

SEQ ID NO: 549 - DNA, 4286 bp, Homo sapiens
  misc_feature: Incyte ID No: 1327121.3
gaaagatgtgctgcaaggggaattggaggctgtgaagcaagccaaactgaaaatgaagaaaagtcagaagttcaagcaatcatcgaatctactcccttgaacctggatatggacaaagatctcagtggatataaaggttcaagcactcccaccaaaggcatagagaacaaagcttttgatcgcaatacagaatctctctttgaagaactgtcttcagctggctcaggcctaataggagatgtggatgaaggagcagatttactaggaatgggtcgggaagttgagaatcttatattagaaaatacacaactgttggaaaccaaaaatgctttgaacatagtgaagaatgatttgatagcaaaagtggatgaactgacctgtgagaaagatgtgctgcaaggggaattggaggctgtgaagcaagccaaactgaaactagaggaaaagaacagagaattggaggaagagcttaggaaagctcgggcagaagctgaagatgcaaggcaaaaagcaaaagatgacgatgatagtgatattcccacagcccagaggaaacggtttactagagtagaaatggcccgtgttctcatggagcgaaaccagtataaagagagattgatggagcttcaggaagctgttcgatggacagagatgattcgggcatcacgagaaaatccagccatgcaggaaaaaaaaaggtcaagcatttggcagtttttcagccgacttttcagctcctcaagtaacacgactaagaagcctgaaccacctgttaatctgaagtacaatgcacccacgtctcatgttactccgtccgtcaagaaaagaagcagcaccttatctcagctccctggggataagtccaaagcctttgatttccttagtgaagaaactgaagctagtttagcctcacgcagagaacaaaagagagagcagtatcgtcaggtaaaagcacatgttcagaaggaagacggtagagtgcaggcttttgtctggagtctgcctcagaagtacaaacaggtaaccaatggtcaaggtgaaaataagatgaaaaatttacctgtgcctgtctatctcagacctctggatgaaaaagatacatcaatgaagctgtggtgtgctgttggagtcaatttatctggtgggaagaccagagatggtggttctgttgttggagcaagtgtattttacaaggatgttgctggtttggatacagaaggcagtaaacagcgaagtgcctctcagagtagtttagataagttagatcaggaacttaaggaacagcagaaggagttaaaaaatcaagaagaattatccagtctagtttggatctgtaccagcactcattcggctacaaaagttcttattattgatgctgttcaacctggcaacatcctagacagtttcactgtttgcaactctcatgttctgtgcattgcaagtgtgccaggtgcacgagaaacagactaccctgcaggagaagatctttcagaatctggtcaggtagacaaagcatctttatgtggaagtatgacaagcaacagctcagcagagacagacagcctgttaggaggcatcacagtggttggttgttctgcagaaggtgtgacgggagctgccacttcccctagtacaaatggtgcttctccagtgatggataaaccaccagaaatggaagcagaaaatagtgaggttgatgaaaatgttccaacagcagaagaagcaactgaagctacagaagggaatgcggggtcagctgaagacacagtggacatctcccaaactggcgtctacacagagcatgtctttacagatcctttgggagttcagatcccagaagacctctccccagtgtatcagtcgagcaatgactcagatgcatataaagatcaaatatcagtactgccaaatgaacaagacttggtgagagaagaagcccagaaaatgagtagtcttttaccaactatgtggcttggagctcaaaatggctgtttgtatgtccattcatctgtagcccagtggaggaaatgtctccattccattaaacttaaagattcgattctcagtattgtacacgtgaagggaatcgtgttagtagccctggctgacggcacccttgcaatctttcacagaggagtggatgggcagtgggatttgtcaaactatcacctcttagaccttggacggcctcatcattccatccgttgcatgactgtggtacatgacaaagtctggtgtggctataggaacaaaatctatgtggtgcagccaaaggccatgaaaatagagaaatcttttgatgcacatcccaggaaggagagccaagtgcgacagcttgcgtgggtgggggatggcgtgtgggtctccattcgcttggattctacgctccgtctctatcatgcacacacttatcaacatctacaggatgtggacattgagccttatgtaagcaaaatgttaggtactggaaaactgggcttctcttttgtgagaattacagctcttatggtgtcttgtaatcgtttgtgggtggggacaggaaatggtgtcattatctccatcccattgacagaaaccgtaatcctccaccagggacgtttactggggctgagggcaaataaaacctcaggtgtaccaggaaatcgtcctggaagtgtaatccgtgtatatggtgatgaaaacagtgataaagtgactccagggacatttataccctattgttcaatggcacatgcacagctttgcttccatgggcaccgggatgctgtgaaattctttgtggcagtcccaggtcaagtcatcagcccacaaagtagcagtagtggcacggatctgacgggtgacaaagcagggccatctgcacaggagcctggtagtcagacgcccttgaagtctatgcttgtcatcagtggaggagagggctacatcgacttccgaatgggtgatgaaggtggagaatcagaacttcttggagaggatcttccacttgaaccttctgtcaccaaagcagaaaggagtcacttgatagtgtggcaagtgatgtatggcaatgagtgagcccatgggaaacaggtggagatggggaagccgtctcttctgcatggtttattttccctctatccttttatttaatgctcttttgtgagataagtttcaccacataatgtgtgagcattttttcctgttaactttatattacaaaatccgttctaccataacaatacagaggaactagctgtgttactgcaccagtgttataggtaacttcagtatattatgaacaaatcaaagaatgtttacttcctgcaaactggtgaattatagaaagcaatccagatgtggtttactctgccacagtctaatgtcattcacttcatttgatggggtcacttgttagctgtcactaataatggaattaatgggaaacacttgataaatgaaactgtaccgttaaatacaatagctgagttttccccagtgtattgtaaaattgacacacactaatacaagatggattatcaggatgtatctaaatgtcccgagagggttaaaagctaactgtaaattactttaactttcactttcaaatctgacaaatcttgtttatatggtatataaaactttgttttcatcagatttgggggggttttatattaaagaaattaagactacactatttaaataaacgtttcctgtttctgacttattagagctctaaagtttatgaggcctacttctctgaatattctgatgggttttttttgagaccagtctcattttcatactgacatgtctgaaagatttattatttataaagcttaggacatactctgggaagcttagaagatacttcagcactgggaggattttttaaaggaaatgtgttttgtatttcttgtaccagagaatggtgatgttgattgagttttttccatgtaaaaaatgtacttgtttgccaaatgttcctagattgctcttaacctgttaatacaagtaaaactgtagtggggatggagtctggcctaagtacagaatgagggatttaattagaaaagttattttcttttgttctgtatcaaactgcagaacagctatatacttggtattttgtacgtgaataacgttttagcttttgtgcccttttgagcttgaagggttatcctcaaaggggaaaactatgaaggggaagaagacaaacctaagataccataaagtaaaggttgacattacatattttcattcacaatgcccattaaaaaaaaaaaataggttgggcatggtggctc

SEQ ID NO: 550 - DNA, 1600 bp, Homo sapiens
  misc_feature: Incyte ID No: 000133CB1
cccgggggcccgggcggcagggcaagcagcgcggcctcggcctatgcgaccggtggcgccggcgcggcttctgcctggagaggattcaagatgaccaacgaagaacctcttcccaagaaggttcgattgagtgaaacagacttcaaagttatggcaagagatgagttaattctaagatggaaacaatatgaagcatatgtacaagctttggagggcaagtacacagatcttaactctaatgatgtaactggcctaagagagtctgaagaaaaactaaagcaacaacagcaggagtctgcacgcagggaaaacatccttgtaatgcgactagcaaccaaggaacaagagatgcaagagtgtactactcaaatccagtacctcaagcaagtccagcagccgagcgttgcccaactgagatcaacaatggtagacccagcgatcaacttgtttttcctaaaaatgaaaggtgaactggaacagactaaagacaaactggaacaagcccaaaatgaactgagtgcctggaagtttacgcctgataggtaaacaaatcatactccccagtcaagacttccctgacagtcccactacgagaaagctgtggtgggacagccaagtactcgtttccacaccaagactcagactttttgagccaaaaaaaagccacattcttacactgtccagcttgtaatggttaatgtaaaacttaccagatgaaccttgtgtttcagcttttttcttttccccttccccttgcttcagaggcctgatggcgtcggactattccgaagaagtggccacctccgaaaaattccccttctagaacatgtagacacttgagaaatgtttctgtttgaagaaaatagagggagaaacagaagtcttaagtctgtggcacactgtgtcttcagacagtttgaaggaatgaaaacctagagattttaaatcatgaattgaacatgtaaaattccagtaaaatgtaaaaacggaatatgcatcgctcttaaccttgagcatagtgacttagagacactgtgtatcagttttgccaataagactgtggacttcatgattgttgttgaacttctgggtcaaaactcaaatgaggtgaattttgcctttaaagggtttatttgctgagaaccaactttcaatagtcatgagagaatcaaataatagatgtccgtacaagtagcgcatatatttaaccatttagtttggggctctatattacttgcttgagccttaatcaatgtggttttattcaatggtttgttctttgaatggttgcaaaaactgtagataatcttactgaggactgtacaaacatgaaggtgtggtatcaaacttcaggttgaaactgtttgaagcattataaacattcatttcacaactagattgtataaggatattagctgtgatgagactcactgcattattttttttagtgaattttatgaaatccccgttccattcaacaggcacatgtttaaaagagctttgtcgttggtgttaatgggggaatgtgttccttcattgtatttgggccttttgtattgcactcttgatattaaattaaatgtgccttgaaaaaaaaaaa

SEQ ID NO: 551 - DNA, 1996 bp, Homo sapiens
  misc_feature: Incyte ID No: 040057.16
tggcttttttttggctcaaaaagtctgagtcttggtgtggaaacgagtacttggctgtcccaccacagctttctcgtagtgggactgtcagggaagtcttgactggggagtatgatttgtttacctatcaggcgtaaacttccaggcactcagttcattttgggcttgttccagtttgtctttagtctgttccagttcacctttcatttttaggaaaaacaagttgatcgctgggtctaccattgttgatctcagttgggcaacgctcggctgctggacttgcttgaggtactggatttgagtagtacactcttgcatctcttgttccttggttgctagtcgcattacaaggatgttttccctgcgtgcagactcctgctgttgttgctttagtttttcttcagactctcttaggccagttacatcattagagttaagatctgtgtacttgccctccaaagcttgtacatatgcttcatattgtttccatcttagaattaactcatctcttgccataactttgaagtctgtttcactcaatcgaaccttcttgggaagaggttcttcgttggtcatcttgaatcaggagagtcgcctttcaggcgtggccgcagtcactcgcccgccgccgaaccccgccaggagaggaaaggtgaagggagggaggccgtcggcctagcccgatcggggcctcgaggcacaatggagcagctgctccccggtaacactccccgtcctttcccaggagcctggcgcgagctccgcgggccccggagctcagcaagctcagtaagggaagcggccgaggggaggggcgggccagcgaggtcggaggtcagccccagggcatcacgggaagggaaggtggaagtactcgccggggccacctgcggctgcggggctgcctcgtgcggagggatctgggcgaaggcggcgcgtgattggccgctctgtgttcgtgacgctcatccgtgatgcttccgcgtgtcggaggaccaggtgccacctcaagagagaggccgtgggcggcgagccgcgggcgtttactcttagcagaagctcacctgtaagttttgagaacttagaaaccgatgccttccctctcatcagtcgtgaggcgcagtctcctggccgctgggttcgttcctccttgacatctctggagacgcatcgaggagctattgttctctggcgtcggaggttgcgctgtgtccgcggcgttgagggccccttgctaactggaacacggggaaggcggccctgtgaggtttagtgaactcaatcaaagaggtcctgcaagtggagtagactccctgaagtaagactgccatctggaccgccgagtaatggcggtgttacctggagaacgtgaaacagtctctaaacacttactagaagagcacgtaattcttttgattggtctgtccttagccggctttatcaaacctgttcatccccaaaggagtgtcttgtagtaaggtgatttattaggataagattaaagtacactccagatggtcgtagtatatttccagtgaatcagatcggtctggagaaaatctttgcaactcgtatcacaagagctctcaaaaattgaaaacaaaaagtgcaaaagccaaaggagaaaatggggaaggacatgaacagatgattctcagaaaaaataccgtaatggtctttaaacatagaaagtcgctccacctcacttacaatggaaatacacgttgaaattacctttcctggtgggagtggaaaaatggttcaagttccacggagtacaaaattacttgtgtttattcttataccttgcagttatacttctaaccctaaccttattctgaaggtgcagctccacacatggaaacaataggtatacaaggttattgcagtgctatttgtcatagcaaaagttagggataacccaaatatccgttaatagggaactgattgggaatggtgcatccatacagtagaacacaatgcaaccattaaaaag

SEQ ID NO: 552 - DNA, 1691 bp, Homo sapiens
  misc_feature: Incyte ID No: 040057.1
gtggcagcgagacccacaaataaaggggagcgcaggggttgcggcgggactaggagcgcggcggggccggcggcagagctgtccggctgcgcggtggcccggggggcccgggcggcagggcaagcagcgcggcctcggcctatgcgaccggtggcgccggcgcggcttctgcctggagaggattcaagatgaccaacgaagaacctcttcccaagaaggttcgattgagtgaaacagacttcaaagttatggcaagagatgagttaattctaagatggaaacaatatgaagcatatgtacaagctttggagggcaagtacacagatcttaactctaatgatgtaactggcctaagagagtctgaagaaaaactaaagcaacaacagcaggagtctgcacgcagggaaaacatccttgtaatgcgactagcaaccaaggaacaagagatgcaagagtgtactactcaaatccagtacctcaagcaagtccagcagccgagcgttgcccaactgagatcaacaatggtagacccagcgatcaacttgtttttcctaaaaatgaaaggtgaactggaacagactaaagacaaactggaacaagcccaaaatgaactgagtgcctggaagtttacgcctgataggtaaacaaatcatactccccagtcaagacttccctgacagtcccactacgagaaagctgtggtgggacagccaagtactcgtttccacaccaagactcagactttttgagccaaaaaaaagccacattcttacattgtccagcttgtaatggttaatgtaaaacttaccagatgaaccttgtgtttcagcttttttcttttccccttccccttgcttcagaggcctgatggcgtcggactattccgaagaagtggccacctccgaaaaattccccttctagaacatgtagacacttgagaaatgtttctgtttgaagaaaatagagggagaaacagaagtcttaagtctgtggcacactgtgtcttcagacagtttgaaggaatgaaaacctagagattttaaatcatgaattgaacatgtaaaattccagtaaaatgtaaaaacggaatatgcatcgctcttaaccttgagcatagtgacttagagacactgtgtatcagttttgccaataagactgtggacttcatgattgttgttgaacttctgggtcaaaactcaaatgaggtgaattttgcctttaaagggtttatttgctgagaaccaactttcaatagtcatgagagaatcaaataatagatgtccgtacaagtagcgcatatatttaaccatttagtttggggctctatattacttgcttgagccttaatcaatgtggttttattcaatggtttgttctttgaatggttgcaaaaactgtagataatcttactgaggactgtacaaacatgaaggtgtggtatcaaacttcaggttgaaactgtttgaagcattataaacattcatttcacaactagattgtataaggatattagctgtgatgagactcactgcattattttttttagtgaattttatgaaatccccgttccattcaacaggcacatgtttaaaagagctttgtcgttggtgttaatgggggaatgtgttccttcattgtatttgggccttttgtattgcactcttgatattaaattaaatgtgccttgaaat

SEQ ID NO: 553 - DNA, 1878 bp, Homo sapiens
  misc_feature: Incyte ID No: 216189.14
agcgaccctggggtctgggtcccctgtgtcgcccccgcccgcctgcagcgcccggcacccgcccaggagcgcgcagctggggttctagggacgtatacttgagcaagagagaccacagctcttgttcccgctgatcctgcagcccagtggatggagtccagaatctacagacctgccaggaaagaaaaaaaaattcctgatgtctggtccaagcaggaattccccggtggattggggaatgtctggcttttcctcagcttattgatctctgtggtaaccactggaggcccccagaagacccatagaaatgagaggcctgaggtctacaagtcgctgctagaaatattttagcctctccaaagcccagaacgcagccccgacccaagtttgtaagggttctgggtgcacgctgaccctgcgcgggcagacgcgccctttgctccaggtccggacctgggcgctgctatagcaacgtcctggacgcccagaccttaggccggcgccgccgcggaagcgaggaacccggctttctcccgctcctgagggctgtggcggcggcggccgggaggcggcccaggctgggtaaagaccgcccggctcctcctatgcaagctgaggcagcggattggttttcaagcatgcccttccagaagcatgtctactacccgctcgccagcggcccagaggggcccgacgtcgctgtggccgccgccgccgcgggtgcggcctccatggcctgtgcgccccccagcgcggcttcggggcccctgcccttcttccagttcaggccgcggctggagagtgtggactggcggcggctgagcgccatcgacgtggacaaggtggcgggggctgtggacgtgctgacgctgcaggagaacatcatgaacatcaccttctgcaagctggaagacgagaagtgcccacactgccagtcgggggtggacccggtgctgctgaagctcatccgtctggcgcagttcaccatcgagtacttgctgcactcacaagagttcctcacctcgcagctgcacaccctggaggagcggctgcgcctgagccactgcgacggcgagcagagcaagaagctgctcaccaagcaggcgggggagatcaagacgctcaaggaagagtgcaaacgccggaagaagatgatctccacccagcagctgatgatcgaggccaaagccaactattaccagtgccatttttgtgacaaggcctttatgaaccaagcttttctacaaagtcacattcaacgccgccacactgaagaaaattctcattttgagtatcagaaaaatgcacagattgagaagctccggagtgagatcgtcgtattgaaggaagagctgcagctcaccaggtctgagctagaggctgcacaccatgccagtgccagtccagcattcctccaaggcaatcatgcacaatagcagcacaaaccaacacagcaggcaagcactttttgcacagttcatttgcaccagcgtggcacacagcaagcaagcaacaaggcagcaaactcagttgcatgcaacatggcacaaacagtcaaggcagcatgtatcatgcaaggcaatttcaacagcaattaacttccgaagaattcagcattagaatatcaactgtcagaaatccagaagtccaatatgcagatcaagtccaacataggcacattacaaagatgcacacgagtttaacgaagaccgttctccatatccccaggatttccataatgtcatgcagcttcttgatagtcaggacaagcaagagagaccacagtcttgttcccgctgatcctgcagcccagtggatggagtccagaatctaccagacctgcaggaaagaaacaaaaaattcctgatgtctggtcca

SEQ ID NO: 554 - DNA, 2035 bp, Homo sapiens
  misc_feature: Incyte ID No: 1382987.15
agggcgaatgggccctctagcatgcatgctcgagcgcggcgccagtgtgctggaaaggcctgagaaggaagtgattgagagcctgctctctctcctcttcgtccaaaaggggcgcttaagagatgctgcccagagacactgtgaacacacaaaatctctctctccattcaatgatgttgtggataagactcctgtcatccgctcagtgatactgaaactgcttttgaagtacagctttcatgatgtaaaagattatattcaggaatatttgaccctgttaaaaaagaaagcattcataactgaagataaaactgaactgtacatgctcttcatcaactgcctggaggattcaatacttgagaagaccagtgcttactccagaaatgatgaactgaaccacctagaagaggaaggtcgtttccttaaggcatattctccagcaagccggggccgagagcctgccaacgaggcctcggttgaatacctgcaagaggtggcccggatccgcctctgcctcgacagagctgcagatttcctctcggagcctgagggaggcccagagatggccaaggagaagcagtgctacctgcagcaagtcaagcagttctgtatccgggtggagaacgactggcaccgggtgtacctggtgcggaagctcagcagccagcgggggatggagttcgtgcagggcctctccaagcccggccgcccgcaccagtgggtgtttcccaaggacgttgtcaagcagcaggggctgcggcaggaccacccaggccagatggataggtacctggtgtacggcgatgaatacaaggctctccgtgatgctgtggccaaagctgtcctcgagtgcaagccactgggcattaagactgctctgaaggcctgcaagaccccccaaagccagcagtcagcctacttcctgttaacactgtttagagaggtggctattttgtacagatcccacaatgcaagcctccaccccacgccagagcaatgtgaagctgtgagcaaattcattggcgaatgcaagatcctttcacctcctgatatcagccgttttgcaacatcgctcgtggacaattctgtgccattgttgagggcggggcctagtgacagcaaccttgatggaacggtgacagaaatggccattcatgctgcagccgtccttctgtgtggacagaatgaactcttggagcccctaaagaatctggccttctccccagccaccatggcgcatgcttttcttccaaccatgcctgaagacttgctggctcaagctcggaggtggaagggtctggagcgagtccactggtacacttgtcccaacggccatccttgctccgtgggagagtgtggcaggccgatggaacagagcatctgcattgactgccatgcgccgattggaggcattgaccacaaacctcgggacggctttcatctggtcaaagacaaggcagacagaacgcagaccggccatgtgctgggcaacccgcagcggagagacgtggtgacatgtgaccgagggctgcccccagtggtcttcctccttatccggctactcactcacttggctctgcttctgggagcgtcccagagttcccaggctctgataaacatcattaagcctccagtgagggatccaaaaggctttctgcagcagcacatcctgaaggacctggagcagttggccaagatgctgggacacagtgccgacgagaccatcggcgtggtccacctcgtcctgcgcaggcttctccaagagcagcaccagctctctagcagaaggcttttaaattttgacacagaattgtcaactaaagaaatgaggaacaactgggaaaaggaaatcgcagctgtgatttctcctgaactggagcatctagataaaacccttcccaccatgaataatctcatcagccaagataagcgtatcagctctaaccctgtggccaaaataatatatggtgacccagtgaccttcctgccccacctgccccggaaaagtgtggtccattgctctaagatttggagc

SEQ ID NO: 555 - DNA, 4559 bp, Homo sapiens
  misc_feature: Incyte ID No: 008942.10
agcgggcggcgcgcacactgctcgctgggccgcggctcccgggtgtcccaggcccggccggtgcgcagagcatggcgggtgcgggcccgaagcggcgcgcgctagcggcgccggcggccgaggagaaggaagaggcgcgggagaagatgctggccgccaagagcgcggacggctcggcgccggcaggcgagggcgagggcgtgaccctgcagcggaacatcacgctgctcaacggcgtggccatcatcgtggggaccattatcggctcgggcatcttcgtgacgcccacgggcgtgctcaaggaggcaggctcgccggggctggcgctggtggtgtgggccgcgtgcggcgtcttctccatcgtgggcgcgctctgctacgcggagctcggcaccaccatctccaaatcgggcggcgactacgcctacatgctggaggtctacggctcgctgcccgccttcctcaagctctggatcgagctgctcatcatccggccttcatcgcagtacatcgtggccctggtcttcgccacctacctgctcaagccgctcttccccacctgcccggtgcccgaggaggcagccaagctcgtggcctgcctgtgcgtgctgctgctcacggccgtgaactgctacagcgtgaaggccgccacccgggtccaggatgcctttgccgccgccaagctcctggccctggccctgatcatcctgctgggcttcgtccagatcgggaagggtgatgtgtccaatctagatcccaacttctcatttgaaggcaccaaactggatgtggggaacattgtgctggcattatacagcggcctctttgcctatggaggatggaattacttgaatttcgtcacagaggaaatgatcaacccctacagaaacctgcccctggccatcatcatctccctgcccatcgtgacgctggtgtacgtgctgaccaacctggcctacttcaccaccctgtccaccgagcagatgctgtcgtccgaggccgtggccgtggacttcgggaactatcacctgggcgtcatgtcctggatcatccccgtcttcgtgggcctgtcctgctttggctccgtcaatgggtccctgttcacatcctccaggctcttcttcgtggggtcccgggaaggccacctgccctccatcctctccatgatccacccacagctcctcacccccgtgccgtccctcgtgttcacgtgtgtgatgacgctgctctacgccttctccaaggacatcttctccgtcatcaacttcttcagcttcttcaactggctctgcgtggccctggccatcatcggcatgatctggctgcgccacagaaagcctgagcttgagcggcccatcaaggtgaacctggccctgcctgtgttcttcatcctggcctgcctcttcctgatcgccgtctccttctggaagacacccgtggagtgtggcatcggcttcaccatcatcctcagcgggctgcccgtctacttcttcggggtctggtggaaaaacaagcccaagtggctcctccagggcatcttctccacgaccgtcctgtgtcagaagctcatgcaggtggtcccccaggagacatagccaggaggccgagtggctgccggaggagcatgcgcagaggccagttaaagtagatcacctcctcgaacccactccggttccccgcaacccacagctcagctgcccatcccagtccctcgccgtccctcccaggtcgggcagtggaggctgctgtgaaaactctggtacgaatctcatccctcaactgagggccagggacccaggtgtgcctgtgctcctgcccaggagcagcttttggtctccttgggccctttttcccttccctcctttgtttacttatatatatattttttttaaacttaaattttgggtcaacttgacaccactaagatgattttttaaggagctgggggaaggcaggagccttcctttctcctgccccaagggcccagaccctgggcaaacagagctactgagacttggaacctcattgctaccacagacttgcactgaagccggacagctgcccagacacatgggcttgtgacattcgtgaaaaccaaccctgtgggcttatgtctctgccttagggtttgcagagtggaaactcagccgtagggtggcactgggagggggtgggggatctgggcaaggtgggtgattcctcccaggaggtgcttgaggccccgatggactcctgaccataatcctagccccgagacaccatcctgagccagggaacagccccagggttggggggtgccggcatctcccctagctcaccaggcctggcctctgggcagtgtggcctcttggctatttctgtgtccagttttggaggctgagttctggttcatgcagacaaagccctgtccttcagtcttctagaaacagagacaagaaaggcagacacaccgcggccaggcacccatgtgggcgcccaccctgggctccacacagcagtgtcccctgccccagaggtcgcagctaccctcagcctccaatgcattggcctctgtaccgcccggcagccccttctggccggtgctgggttcccactcccggcctaggcacctccccgctctccctgtcacgctcatgtcctgtcctggtcctgatgcccgttgtctaggagacagagccaagcactgctcacgtctctgccgcctgcgtttggaggcccctgggctctcacccagtccccacccgcctgcagagagggaactagggcaccccttgtttctgttgttcccgtgaatttttttcgctatgggaggcagccgaggcctggccaatgcggcccactttcctgagctgtcgctgcctccatggcagcagccaaggacccccagaacaagaagacccccccgcaggatccctcctgagctcggggggctctgccttctcagggccccgggcttcccttctccccagccagaggtggagccaagtggtccagcgtcactccagtgctcagctgtggctggaggagctggcctgtggcacagccctgagtgtcccaagccgggagccaacgaagccggacacggcttcactgaccagcggctgctcaagccgcaagctctcagcaagtgcccagtggagcctgccgcccccacctgggcaccgggaccccctcaccatccagtgggcccggagaaacctgatgaacagtttggggactcaggaccagatgtccgtctctcttgcttgaggaatgaagacctttattcacccctgccccgttgcttcccgctgcacatggacagacttcacagcgtctgctcataggacctgcatccttcctggggacgaattccactcgtccaagggacagcccacggtctggaggccgaggaccaccagcaggcaggtggactgactgttgggcaagacctcttccctctgggcctgttctcttggctgcaaataaggacagcagctggtgccccacctgcctggtgcattgctgtgtgaatccaggaggcagtggacatcgtaggcagccacggccccgggtccaggagaagtgctccctggaggcacgcaccactgcttcccactggggccggcggggcccacgcacgacgtcagcctcttaccttcccgcctcggctaggggtcctcgggatgccgttctgttccaacctcctgctctgggacgtggacatgcctcaaggatacagggagccggcggcctctcgacggcacgcacttgcctgttggctgctgcggctgtgggcgagcatgggggctgccagcgtctgttgtggaaagtagctgctagtgaaatggctggggccgctggggtccgtcttcacactgcgcaggtctcttctgggcgtctgagctggggtgggagctcctccgcagaaggttggtggggggtccagtctgtgatccttggtgctgtgtgccccactccagcctggggaccccacttcagaaggtaggggccgtgtcccgcggtgctgactgaggcctgcttccccctccccctcctgctgtgctggaattccacagggaccagggccaccgcaggggactgtctcagaagacttgatttttccgtccctttttctccacactccactgacaaacgtccccagcggtttccacttgtgggcttcaggtgttttcaagcacaacccaccacaacaagcaagtgcattttcagtcgttgtgcttttttgttttgtgctaacgtcttactaatttaaagatgctgtcggcaccatgtttatttatttccagtggtcatgctcagccttgctgctctgcgtggcgcaggtgccatgcctgctccctgtctgtgtcccagccacgcagggccatccactgtgacgtcggccgaccaggctggacaccctctgccgagtaatgacgtgtgtggctgggaccttctttattctgtgttaatggctaacctgttacactgggctgggttgggtagggtgttctggcttttttgtggggtttttatttttaaagaaacactcaatcatcctaaaaaaaaattaaaaa

SEQ ID NO: 556 - DNA, 1362 bp, Homo sapiens
  misc_feature: Incyte ID No: 995874.18
ggtgtatttggattctcccggggccccgccccctcctccctccttgcagagccggcgccggaggagacgcacgcagctgactttgtcttctccgcacgactgttacagaggtctccagagccttctctctcctgtgcaaaatggcaactcttaaggaaaaactcattgcaccagttgcggaagaagaggcaacagttccaaacaataagatcactgtagtgggtgttggacaagttggtatggcgtgtgctatcagcattctgggaaagtctctggctgatgaacttgctcttgtggatgttttggaagataagcttaaaggagaaatgatggatctgcagcatgggagcttatttcttcagacacctaaaattgtggcagataaagattattctgtgaccgccaattctaagattgtagtggtaactgcaggagtccgtcagcaagaaggggagagtcggctccaatctggtgcagagaaatgttaatgtcttcaaattcattattcctcagatcgtcaagtacagtcctgattgcatcataattgtggtttccaacccagtggacattcttacgtatgttacctggaaactaagtggattacccaaacaccgcgtgattggaagtggatgtaatctggattctgctagatttcgctaccttatggctgaaaaacttggcattcatcccagcagctgccatggatggattttgggggaacatggcgactcaagtgtggctgtgtggagtggtgtgaatgtggcaggtgtttctctccaggaattgaatccagaaatgggaactgacaatgatagtgaaaattggaaggaagtgcataagatggtggttgaaagtgcctatgaagtcatcaagctaaaaggatataccaactgggctattggattaagtgtggctgatcttattgaatccatgttgaaaaatctatccaggattcatcccgtgtcaacaatggtaaaggggatgtatggcattgagaatgaagtcttcctgagccttccatgtatcctcaatgcccggggattaaccagcgttatcaaccagaagctaaaggatgatgaggttgctcagctcaagaaaagtgcagataccctgtgggacatccagaaggacctaaaagacctgtgactagtgagctctaggctgtagaaatttaaaaactacaatgtgattaactcgagcctttagttttcatccatgtacatggatcacagtttgctttgatcttcttcaatatgtgaatttgggctcacagaatcaaagcctatgcttggtttaatgcttgcaatctgagctcttgaacaaataaaattaactattgtagtgtgaaaaaaaaaaaaaagg

SEQ ID NO: 557 - DNA, 1413 bp, Homo sapiens
  misc_feature: Incyte ID No: 898317.5
cacccccaggcccccatccgagagggaaggggccggctcgcccctcaaaatggcggcagcagcgatgcgcctgcgtacagaactcctccgtcgcgccaggccggcgggaagtgaggttctcggacgagccgccagaagtgtacggcgacttcgagcccctggtggccaaagaaaggtccccggtgggaaaacgaacccggctagaagagttccggtccgattctgcgaaagaggaagtgagagaaagcgcgtactaccttcggtctaggcagcggaggcagccgcgaccccaggaaaccgaggaaatgaagacgcgaaggactacccgccttcagcagcagcactcagagcagcctccgctacagccgtctcctgttacgaccaggagagggctgcgggactctcattcctctgaagaggatgaagcatcttcccaaactgatttaagccaaacgatctcaaagaaaactgtcaggagcatacaagaggctccagtgagtgaagatcttgtaatcaggttacgtcgaccccctctaagatacccaagatatgaagccaccagtgtccaacagaaggtcaatttctctgaagaaggagaaactgaagaagatgatcaagacagctctcacagcagtgtcactactgttaaggccagatccagggattctgatgaatctggagataaaaccaccagatcatctagtcaatatatagaatcattttggcagtcatcacaaagtcaaaacttcacagctcatgataagcaacgttcagtgctaagctcaggatatcaaaaaactccccaggaatgggccccacaaactgcaagaataaggaccaggatgcaaaatgacagcattctgaaatcagagcttggaaaccagtcaccatcaacctccagccgacaagtgactggacaaccccaaaatgcatcttttgtcaagaggaaccggtggtggctacttcctctgatagctgctcttgcctctgggagtttttggttctttagtactcctgaggtagaaaccactgctgttcaagagttccagaaccagatgaatcaacttaagaataagtaccaaggtcaagatgagaagctgtggaaaaggagccaaacattcctggaaaaacatcttaatagctcccatcctcggtctcagcctgctatcttactgctcactgctgcccgagatgctgaagaagcacttaggtgtctgagtgaacaaattgctgatgcctattcttcttttcgtagtgtccgtgccatccggattgatgggacagataaagctactcaagacagtgatactgtcaaactagaggtagaccaagaactgagcaatggatttaagaatggccagaatgcagctgtggtacaccgctttgagtcatttcccgcaggctctactttga

SEQ ID NO: 558 - DNA, 5460 bp, Homo sapiens
  misc_feature: Incyte ID No: 149791.5
gaccacctgatcgaaggaaaaggaaggcacagcggagcgcagagtgagaaccaccaaccgaggcgccgggcagcgacccctgcagcggagacagagactgagcggcccggccccgccatgcctgcgctctggctgggctgctgcctctgcttctcgctcctcctgcccgcagcccgggccacctccaggagggaagtctgtgattgcaatgggaagtccaggcagtgtatctttgatcgggaacttcacagacaaactggtaatggattccgctgcctcaactgcaatgacaacactgatggcattcactgcgagaagtgcaagaatggcttttaccggcacagagaaagggaccgctgtttgccctgcaattgtaactccaaaggttctcttagtgctcgatgtgacaactccggacggtgcagctgtaaaccaggtgtgacaggagccagatggcgaccgatgtctggccaggcttccacatgctcacggatgcggggtgcacccaagaccagagactgctagactccaagtgtgactgtgacccagctggcatcgcagggccctgtgacgcgggccgctgtgtctgcaagccagctgttactggagaacgctgtgataggtgtcgatcaggttactataatctggatggggggaaccctgagggctgtacccagtgtttctgctatgggcattcagccagctgccgcagctctgcagaatacagtgtccataagatcacctctacctttcatcaagatgttgatggctggaaggctgtccaacgaaatgggtctcctgcaaagctccaatggtcacagcgccatcaagatgtgtttagctcagcccaacgactagaccctgtctattttgtggctcctgccaaatttcttgggaatcaacaggtgagctatggtcaaagcctgtcctttgactaccgtgtggacagaggaggcagacacccatctgcccatgatgtgattctggaaggtgctggtctacggatcacagctcccttgatgccacttggcaagacactgccttgtgggctcaccaagacttacacattcaggttaaatgagcatccaagcaataattggagcccccagctgagttactttgagtatcgaaggttactgcggaatctcacagccctccgcatccgagctacatatggagaatacagtactgggtacattgacaatgtgaccctgatttcagcccgccctgtctctggagccccagcaccctgggttgaacagtgtatatgtcctgttgggtacaaggggcaattctgccaggattgtgcttctggctacaagagagattcagcgagactggggccttttggcacctgtattccttgtaactgtcaagggggaggggcctgtgatccagacacaggagattgttattcaggggatgagaatcctgacattgagtgtgctgactgcccaattggtttctacaacgatccgcacgacccccgcagctgcaagccatgtccctgtcataacgggttcagctgctcagtgatgccggagacggaggaggtggtgtgcaataactgccctcccggggtcaccggtgcccgctgtgagctctgtgctgatggctactttggggacccctttggtgaacatggcccagtgaggccttgtcagccctgtcaatgcaacaacaatgtggaccccagtgcctctgggaattgtgaccggctgacaggcaggtgtttgaagtgtatccacaacacagccggcatctactgcgaccagtgcaaagcaggctacttcggggacccattggctcccaacccagcagacaagtgtcgagcttgcaactgtaaccccatgggctcagagcctgtaggatgtcgaagtgatggcacctgtgtttgcaagccaggatttggtggccccaactgtgagcatggagcattcagctgtccagcttgctataatcaagtgaagattcagatggatcagtttatgcagcagcttcagagaatggaggccctgatttcaaaggctcagggtggtgatggagtagtacctgatacagagctggaaggcaggatgcagcaggctgagcaggcccttcaggacattctgagagatgcccagatttcagaaggtgctagcagatcccttggtctccagttggccaaggtgaggagccaagagaacagctaccagagccgcctggatgacctcaagatgactgtggaaagagttcgggctctgggaagtcagtaccagaaccgagttcgggatactcacaggctcatcactcagatgcagctgagcctggcagaaactgaagcttccttgggaaacactaacattcctgcctcagaccactacgtggggccaaatggctttaaaagtctggctcaggaggccacaagattagcagaaagccacgttgagtcagccagtaacatggagcaactgacaagggaaactgaggactattccaaacaagccctctcactggtgcgcaaggccctgcatgaaggagtcggaagcggaagcggtagcccggacggtgctgtggtgcaagggcttgtggaaaaattggagaaaaccaagtccctggcccagcagttgacaagggaggccactcaagcggaaattgaagcagataggtcttatcagcacagtctccgcctcctggattcagtgtctcggcttcagggagtcagtgatcagtcctttcaggtggaagaagcaaagaggatcaaacaaaaagcggattcactctcaagcctggtaaccaggcatatggatgagttcaagcgtacacagaagaatctgggaaactggaaagaagaagcacagcagctcttacagaatggaaaaagtgggagagagaaatcagatcagctgctttcccgtgccaatcttgctaaaagcagagcacaagaagcactgagtatgggcaatgccactttttatgaagttgagagcatccttaaaaacctcagagagtttgacctgcaggtggacaacagaaaagcagaagctgaagaagccatgaagagactctcctacatcagccagaaggtttcagatgccagtgacaagacccagcaagcagaaagagccctggggagcgctgctgctgatgcacagagggcaaagaatggggccggggaggccctggaaatctccagtgagattgaaccaggagattgggagtctgaacttggaagccaatgtgacagcagatggagccttggccatggaaaagggactggcctctctgaagagtgagatgagggaagtggaaggagagctggaaaggaaggagctggagtttgacacgaatatggatgcagtacagatggtgattacagaagcccagaaggttgataccagagccaagaacgctggggttacaatccaagacacactcaacacattagacggcctcctgcatctgatggaccagcctctcagtgtagatgaagaggggctggtcttactggagcagaagctttcccgagccaagacccagatcaacagccaactgcggcccatgatgtcagagctggaagagagggcacgtcagcagaggggccacctccatttgctggagacaagcatagatgggattctggctgatgtgaagaacttggagaacattagggacaacctgcccccaggctgctacaatacccaggctcttgagcaacagtgaagctgccataaatatttctcaactgaggttcttgggatacagatctcaggggctcgggagccatgtcatgtgagtgggtgggatggggacatttgaacatgtttaatgggtatgctcaggtcaactgacctgaccccattcctgatcccatggccaggtggttgtcttattgcaccatactccttgcttcctgatgctgggcaatgaggcagatagcactgggtgtgagaatgatcaaggatctggaccccaaagaatagactggatggaaagacaaactgcacaggcagatgtttgcctcataatagtcgtaagtggagtcctggaatttggacaagtgctgttgggatatagtcaacttattctttgagtaatgtgactaaaggaaaaaactttgactttgcccaggcatgaaattcttcctaatgtcagaacagagtgcaacccagtcacactgtggccagtaaaatactattgcctcatattgtcctctgcaagcttcttgctgatcagagttcctcctacttacaacccagggtgtgaacatgttctccattttcaagctggaagaagtgagcagtgttggagtgaggacctgtaaggcaggcccattcagagctatggtgcttgctggtgcctgccaccttcaagttctggacctgggcatgacatcctttcttttaatgatgccatggcaacttagagattgcatttttattaaagcatttcctaccagcaaagcaaatgttgggaaagtatttactttttcggtttcaaagtgatagaaaagtgtggcttgggcattgaaagaggtaaaattctctagatttattagtcctaattcaatcctacttttcgaacaccaaaaatgatgcgcatcaatgtattttatcttattttctcaatctcctctctctttcctccacccataataagagaatgttcctactcacacttcagctgggtcacatccatccctccattcatccttccatccatctttccatccattacctccatccatccttccaacatatatttattgagtacctactgtgtgccaggggctggtgggacagtggtgacatagtctctgccctcatagagttgattgtctagtgaggaagacaagcatttttaaaaaataaatttaaacttacaaactttgtttgtcacaagtggtgtttattgcaataaccgcttggtttgcaacctctttgctcaacagaacatatgttgcaagaccctcccatgggggcacttgagttttggcaaggctgacagagctctgggttgtgcacatttctttgcattccagctgtcactctgtgcctttctacaactgattgcaacagactgttgagttatgataacaccagtgggaattgctggaggaaccagaggcacttccaccttggctgggaagactatggtgctgccttgcttctgtatttccttggattttcttttatataacacatgtggcatcagctgaaccaggcaggaaactgcttgttctaagtacatttttacaactgttgtctcctgttttcctttgtttcatttcctggcttatgactgttctgcctggacaaggctgttccatctttcgctctccagcaatagcattcatcctgagcactctgtgggtcttccttcaccttccacaaagcaactctttcttggattgatggagtccgcttctgggatttcttccaagctgctgagatctctttattctaaaggaacctaacagtg

SEQ ID NO: 559 - DNA, 4108 bp, Homo sapiens
  misc_feature: Incyte ID No: 3615080CB1
tgccagattcctgagacccgcctgcggtggggctacacccagccagggagtctccagaggtgaggctgttgtttaaaaacctggagccgggaggggagacccccacattcaagaggagctttcaggcgatctggagaaagaacggcagaacacacagcaaggaaaggtcctttctggggatcaccccattggctgaagatgagaccattcttcctcttgtgttttgccctgcctggcctcctgcatgcccaacaagcctgctcccgtggggcctgctatccacctgttggggacctgcttgttgggaggacccggtttctccgagcttcatctacctgtggactgaccaagcctgagacctactgcacccagtatggcgagtggcagatgaaatgctgcaagtgtgactccaggcagcctcacaactactacagtcaccgagtagagaatgtggcttcatcctccggccccatgcgctggtggcagtcacagaatgatgtgaaccctgtctctctgcagctggacctggacaggagattccagcttcaagaagtcatgatggagttccaggggcccatgcccgccggcatgctgattgagcgctcctcagacttcggtaagacctggcgagtgtaccagtacctggctgccgactgcacctccaccttccctcgggtccgccagggtcggcctcagagctggcaggatgttcggtgccagtccctgcctcagaggcctgatgcacgcctaaatggggggaaggtccaacttaaccttatggatttagtgtctgggattccagcaactcaaagtcaaaaaattcaagaggtgggggagatcacaaacttgagagtcaatttcaccaggctggcccctgtgccccaaaggggctaccaccctcccagcgcctactatgctgtgtcccagctccgtctgcaggggagctgcttctgtcacggccatgctgatcgctgcgcacccaagcctggggcctctgcaggcccctccaccgctgtgcaggtccacgatgtctgtgtctgccagcacaacactgccggcccaaattgtgagcgctgtgcacccttctacaacaaccggccctggagaccggcggagggccaggacgcccatgaatgccaaaggtgcgactgcaatgggcactcagagacatgtcactttgaccccgctgtgtttgccgccagccagggggcatatggaggtgtgtgtgacaattgccgggaccacaccgaaggcaagaactgtgagcggtgtcagctgcactatttccggaaccggcgcccgggagcttccattcaggagacctgcatctcctgcgagtgtgatccggatggggcagtgccaggggctccctgtgacccagtgaccgggcagtgtgtgtgcaaggagcatgtgcagggagagcgctgtgacctatgcaagccgggcttcactggactcacctacgccaacccgcagggctgccaccgctgtgactgcaacatcctggggtcccggagggacatgccgtgtgacgaggagagtgggcgctgcctttgtctgcccaacgtggtgggtcccaaatgtgaccagtgtgctccctaccactggaagctggccagtggccagggctgtgaaccgtgtgcctgcgacccgcacaactccctcagcccacagtgcaaccagttcacagggcagtgcccctgtcgggaaggctttggtggcctgatgtgcagcgctgcagccatccgccagtgtccagaccggacctatggagacgtggccacaggatgccgagcctgtgactgtgatttccggggaacagagggcccgggctgcgacaaggcatcaggccgctgcctctgccgccctggcttgaccgggccccgctgtgaccagtgccagcgaggctactgcaatcgctacccggtgtgcgtggcctgccacccttgcttccagacctatgatgcggacctccgggagcaggccctgcgctttggtagactccgcaatgccaccgccagcctgtggtcagggcctgggctggaggaccgtggcctggcctcccggatcctagatgcaaagagtaagattgagcagatccgagcagttctcagcagccccgcagtcacagagcaggaggtggctcaggtggccagtgccatcctctccctcaggcgaactctccagggcctgcagctggatctgcccctggaggaggagacgttgtcccttccgagagacctggagagtcttgacagaagcttcaatggtctccttactatgtatcagaggaagagggagcagtttgaaaaaataagcagtgctgatccttcaggagccttccggatgctgagcacagcctacgagcagtcagcccaggctgctcagcaggtctccgacagctcgcgccttttggaccagctcagggacagccggagagaggcagagaggctggtgcggcaggcgggaggaggaggaggcaccggcagccccaagcttgtggccctgaggctggagatgtcttcgttgcctgacctgacacccaccttcaacaagctctgtggcaactccaggcagatggcttgcaccccaatatcatgccctggtgagctatgtccccaagacaatggcacagcctgtggctcccgctgcaggggtgtccttcccagggccggtggggccttcttgatggcggggcaggtggctgagcagctgcggggcttcaatgcccagctccagcggaccaggcagatgattagggcagccgaggaatctgcctcacagattcaatccagtgcccagcgcttggagacccaggtgagcgccagccgctcccagatggaggaagatgtcagacgcacacggctcctaatccagcaggtccgggacttcctaacagaccccgacactgatgcagccactatccaggaggtcagcgaggccgtgctggccctgtggctgcccacagactcagatactgttctgcagaagatgaatgagatccaggccattgcagccaggctccccaacgtggacttggtgctgtcccagaccaagcaggacattgcgcgtgcccgccggttgcaggctgaggctgaggaagccaggagccgagcccatgcagtggagggccaggtggaagatgtggttgggaacctgcggcaggggacagtggcactgcaggaagctcaggacaccatgcaaggcaccagccgctcccttcggcttatccaggacagggttgctgaggttcagcaggtactgcggccagcagaaaagctggtgacaagcatgaccaagcagctgggtgacttctggacacggatggaggagctccgccaccaagcccggcagcagggggcagaggcagtccaggcccagcagcttgcggaaggtgccagcgagcaggcattgagtgcccaagagggatttgagagaataaaacaaaagtatgctgagttgaaggaccggttgggtcagagttccatgctgggtgagcagggtgcccggatccagagtgtgaagacagaggcagaggagctgtttggggagaccatggagatgatggacaggatgaaagacatggagttggagctgctgcggggcagccaggccatcatgctgcgctcagcggacctgacaggactggagaagcgtgtggagcagatccgtgaccacatcaatgggcgcgtgctctactatgccacctgcaagtgatgctacagcttccagcccgttgccccactcatctgccgcctttgcttttggttgggggcagattgggttggaatgctttccatctccaggagactttcatgtagcctaaagtacagcctggaccacccctggtgtgtagctagtaagattaccctgagctgcagctgagcctgagccaatgggacagttacacttgacagacaaagatggtggagattggcatgccattgaaactaagagctctcaagtcaaggaagctgggctgggcagtatcccccgcctttagttctccactggggaggaatcctggaccaagcacaaaaacttaacaaaagtgatgtaaaaatgaaaagccaaataaaaatctttggaaaagaaaaaaaaaaaaaaa

SEQ ID NO: 560 - DNA, 1195 bp, Homo sapiens
  misc_feature: Incyte ID No: 1640555CB1
atggtcgggagagttcaaccggatcggaaacagttgccactggtcctactgagattgctctgccttcttcccacaggactgcctgttcgcagcgtggattttaaccgaggcacggacaacatcaccgtgaggcagggggacacagccatcctcaggtgcgttctagaagacaagaactcaaaggtggcctggttgaaccgttctggcatcatttttgctggacatgacaagtggtctctggacccacgggttgagctggagaaacgccattctctggaatacagcctccgaatccagaaggtggatgtctatgatgagggttcctacacttgctcagttcagacacagcatgagcccaagacctcccaagtttacttgatcgtacaagtcccaccaaagatctccaatatctcctcggatgtcactgtgaatgagggcagcaacgtgactctggtctgcatggccaatggccgtcctgaacctgttatcacctggagacaccttacaccaactggaagggaatttgaaggagaagaagaatatctggagatccttggcatcaccagggagcagtcaggcaaatatgagtgcaaagctgccaacgaggtctcctcggcggatgtcaaacaagtcaaggtcactgtgaactatcctcccactatcacagaatccaagagcaatgaagccaccacaggacgacaagcttcactcaaatgtgaggcctcggcagtgcctgcacctgactttgagtggtaccgggatgacactaggataaatagtgccaatggccttgagattaagagcacggagggccagtcttccctgacggtgaccaacgtcactgaggagcactacggcaactacacctgtgtggctgccaacaagctgggggtcaccaatgccagcctagtccttttcagacctgggtcggtgagaggaataaatggatccatcagtctggccgtaccactgtggctgctggcagcatctctgctctgccttctcagcaaatgttaatagaataaaaatttaaaaataatttaaaaaacacacaaaaatgcgtcacacagaatacagagagagagagacagagagagagagagagagagagatgggggagaccgtttatttcacaactttgtgtgtttatacatgaagggggaaataagaaagtgaagaagaaaatacaacatat

SEQ ID NO: 561 - DNA, 1526 bp, Homo sapiens
  misc_feature: Incyte ID No: 1040479.5
cagacgccgaggatggccgtgcatggcgccccgaaccctcgtcctgctactctcgggggctctgggccctgaacccagacctgggcgggctctcactccatgaggtatttcttcacatccgtgtcccggcccggccgcggggagccccgcttcatcgcagtgggctacgtggacgacacgcagttcgtgcggttcgacagcgacgccgcgagccagaggatggagccgcgggcgccgtggatagagcaggagggtccggagtattgggacggggagacacggaaagtgaaggcccactcacagactcaccgagtggacctggggaccctgcgcggctactacaaccagagcgaggccggttctcacaccgtccagaggatgtatggctgcgacgtggggtcggactggcgcttcctccgcgggtaccaccagtacgcctacgacggcaaggattacatcgccctgaaagaggacctgcgctcttggaccgcggcggacatggcagctcagaccaccaagcacaagtgggaggcggcccatgtggcggagcagttgagagcctacctggagggcacgtgcgtggagtggctccgcagatacctggagaacgggaaggagacgctgcagcgcacggacgcccccaaaacgcatatgactcaccacgctgtctctgaccatgaagccaccctgaggtgctgggccctgagcttctaccctgcggagatcacactgacctggcagcgggatggggaggaccagacccaggacacggagctcgtggagaccaggcctgcaggggatggaaccttccagaagtgggtggctgtggtggtgccttctggacaggagcagagatacacctgccatgtgcagcatgagggtttgcccaagcccctcaccctgagatgggagccgtcttcccagcccaccatccccatcgtgggcatcattgctggcctggttctctttggagctgtgatcactggagctgtggtcgctgctgtgatgtggaggaggaagagctcagatagaaaaggagggagctactctcaggctgcaagcagtgacagtgcccagggctctgatgtgtctctcacagcttgtaaagtgtgagacagctgccttgtgtgggactgagaggcaagagttgttcctgcccttccctttgtgacttgaagaaccctgactttgtttctgcaaaggcacctgcatgtgtctgtgttcgtgtaggcataatgtgaggaggtggggagaccaccccacccccatgtccaccatgaccctcttcccacgctgacctgtgctccctccccaatcatctttcctgttccagagaggtggggctgaggtgtctccatctctgtctcaacttcatggtgcactgagctgtaacttcttccttccctattaaaattagaacctgagtataaatttactttctcaaattcttgccatgagaggttgatgagttaattaaaggagaagattcctaaaatttgagagacaaaataaatggaacacatgag

SEQ ID NO: 562 - DNA, 1155 bp, Homo sapiens
  misc_feature: Incyte ID No: 1383423.1
  unsure 344, 394: a, t, c, g, or other
cgccgaggatggccgtcatggcgccccgaaccctcgtcctgctactctcggggggccctggccctgacccagacctgggcgggctcccactccatgaggtatttctacacttccgtgtcccggcccggccgcggggagccccgcttcatcgccgtgggctacgtggacgacacgcagttgcgtgcggttcgacagcgacgccgcgagccagaggatggagccgcgggcgccgtggatagagcaggaggggccggagtattgggaccggaacacacggaatgtgaaggcccatcacagactgaccgagaggacctgcggatcgcgctccgctactacaaccagancgaggccgggtctcacaccctccagaatatgtatggctgcgacgtggggncggacgggcgcctcctccgcgggtatgaccaggacgcctacgacggcaaggattacatcgccctgaacgaggacctgagctcctgggaccgcggcggacaccgcggctcagatcacccagcgcaagtgggaggcggcccgtgtggcggagcaggacagagcctacctggagggcgagtgcgtggagtggctccgcagatacctggagaacgggaaggacaagctggagcgcgctggtaccaggggcagtggggagccttccccatctcctataggtcgccggggatggcctcccacgagaagaggaggaaaatgggatcagcgctagaatgtcgccctccgttgaatggagaatggcatgagttttcctgagtttcctctgagggccccctcttctctctagacattaaggaatgacgtctctgaggaaatggaggggaagacagtccctagaatactgatcaggggtcccctttgacccctgcagcagccttgggaaccgtgacttttcctctcaggccttgttctctgcctcacactcagtgtgtttggggctctgattccagcacttctgagtcactttacctccactcagatcaggagcagaagtccctgttccccgctcagagactcgaactttccaatgaataggagattatcccaggtgcctgcgtccaggctggtgtctgggttctgtgccccttccccaccccaggtgtcctgtccattctcaggctggtcacatgggtggtcctaggtgtc

SEQ ID NO: 563 - DNA, 1377 bp, Homo sapiens
  misc_feature: Incyte ID No: 4847977CB1
  unsure 1350: a, t, c, g, or other
cccacgcgtccgcccacgcgtccgcccacgcgtccggttctaaagtccccagtcacccacccggactcggattctccccagacgccgagatgcgggtcatggcgccccgaaccctcatcctgctgctctcgggagccctggccctgaccgagacctgggcctgctcccactccatgaggtatttcgacaccgccgtgtcccggcccggccgcggagagccccgcttcatctcagtgggctacgtggacgacacgcagttcgtgcggttcgacagcgacgccgcgagtccgagaggggagccccgggcgccgtgggtggagcaggaggggccggagtattgggaccgggagacacagaagtacaagcgccaggcacaggctgaccgagtgaacctgcggaaactgcgcggctactacaaccagagcgaggacgggtctcacaccctccagtggatgtatggctgcgacctggggcccgacgggcgcctcctccgcgggtatgaccagtccgcctacgacggcaaggattacatcgccctgaacgaggacctgcgctcctggaccgccgcggacacggcggctcagatcacccagcgcaagtgggaggcggcccgtgaggcggagcagtggagagcctacctggagggcacgtgcgtggagtggctccgcagatacctggagaacgggaaggagacgctgcagcgcgcggaacacccaaagacacacgtgacccaccatcccgtctctgaccatgaggccaccctgaggtgctgggccctgggcttctaccctgcggagatcacactgacctggcagcgggatggcgaggaccaaactcaggacaccgagcttgtggagaccaggccagcaggagatggaaccttccagaagtgggcagctgtggtggtgccttctggagaagagcagagatacacgtgccatgtgcagcacgaggggctgccagagcccctcaccctgagatgggagccatcttcccagcccaccatccccatcgtgggcatcgttgctggcctggctgtcctggctgtcctagctgtcctaggagctgtgatggctgttgtgatgtgtaggaggaagagctcaggtggaaaaggagggagctgctctcaggctgcgtccagcaacagtgcccagggctctgatgagtctctcatcgcttgtaaagcctgagacagctgcctgtgtgggactgagatgcaggatttcttcacacctctcctttgtgacttcaagagcctctggcatctctttctgcaaaggcatctgaatgtgtctgcgttcctgttagcataatgtgaggaggtggagagacagccacccccgtgtccanccgtgaccctgtccccacacttgactg

SEQ ID NO: 564 - DNA, 1466 bp, Homo sapiens
  misc_feature: Incyte ID No: 4911716CB1
gtcgcggttctaaagtccgcacgcacccaccgggactcagattctccccagacgccgaggatggccgtcatggcgccccgaaccctcgtcctgctactctcgggggctctggccctgacccagacctgggcgggctctcactccatgaggtatttcttcacatccgtgtcccggcccggccgcggggagccccgcttcatcgcagtgggctacgtggacgacacgcagttcgtgcggttcgacagcgacgccgcgagccagaggatggagccgcgggcgccgtggatagagcaggagggtccggagtattgggacggggagacacggaaagtgaaggcccactcacagactcaccgagtggacctggggaccctgcgcggctactacaaccagagcgaggccggttctcacaccgtccagaggatgtatggctgcgacgtggggtcggactggcgcttcctccgcgggtaccaccagtacgcctacgacggcaaggattacatcgccctgaaagaggacctgcgctcttggaccgcggcggacatggcagctcagaccaccaagcacaagtgggaggcggcccatgtggcggagcagttgagagcctacctggagggcacgtgcgtggagtggctccgcagatacctggagaacgggaaggagacgctgcagcgcacggacgcccccaaaacgcatatgactcaccacgctgtctctgaccatgaagccaccctgaggtgctgggccctgagcttctaccctgcggagatcacactgacctggcagcgggatggggaggaccagacccaggacacggagctcgtggagaccaggcctgcaggggatggaaccttccagaagtgggcggctgtggtggtgccttctggacaggagcagagatacacctgccatgtgcagcatgagggtttgcccaagcccctcaccctgagatgggagccgtcttcccagcccaccatccccatcgtgggcatcattgctggcctggttctctttggagctgtgatcactggagctgtggtcgctgctgtgatgtggaggaggaagagctcagatagaaaaggagggagctactctcaggctgcaagcagtgacagtgcccagggctctgatgtgtctctcacagcttgtaaagtgtgagacagctgccttgtgtgggactgagaggcaagagttgttcctgcccttccctttgtgacttgaagaaccctgactttgtttctgcaaaggcacctgcatgtgtctgtgttcgtgtaggcataatgtgaggaggtggggagaccaccccacccccatgtccaccatgaccctcttcccacgctgacctgtgctccctccccaatcatctttcctgttccagagaggtggggctgaggtgtctccatctctgtctcaacttcatggtgcactgagctgtaacttcttcctccgctattaaaattagaact

SEQ ID NO: 565 - DNA, 1014 bp, Homo sapiens
  misc_feature: Incyte ID No: 232898.20
aagcgggggcctggacaggcttggccaggtcctagctgctcttgttccccagggctggaaggggcggggcctcagggtccaggaatccgacacttccggtctctcttgtccctcgtcttcccaggagccttccagagtgaatgaggcagccacaaatccctcactttcagatgaagacactgaccccagagagtggcagtgccccggctcctaacgcagcccacttccctcccgccccttcttagaaaccaggagcacccacaccctggacctctccagggagctctcggaggcccttggccagatctttgacagccagcggggctgcgacctgtccatcagcgtgaatgtgcagggcgaggacgccctgggcttctgtggccacacggtcatcctgactgccaacctggaggcccaggccctgtggaaggagccgggcagcaatgtcaccatgagtgtggatgctgagtgtgtgcccatggtcagggaccttctcaggtgagccgtctcgtcctcaggctctggggccgccaggggctttgtcctcctcccctcttcaaaagcacagccccccacacacacacctgcacatactcatgcatgcacatgtacacacgcagtcacacatgcactcacgcagttgcacacacacgcatgctcactcccacactgtgtgcactcaggtggctgtgttggacagttgggcccagggctcccctgctgtcctgtggggccggcatctgctctccttctttctccccaggtacttctactcccgaaggattgacatcaccctgtcgtcagtcaagtgcttccacaagctggcctctgcctatggggccaggcagctgcagggctactgcgcaagcctctttgccatcctcctcccccaggacccctcgttccagatgcccctggacctgtatgcctatgcagtggccacaggggacgccctgctggagaagctctgcctacagttcctggcctggaacttcgaggccttgacgcaggccg

SEQ ID NO: 566 - DNA, 1994 bp, Homo sapiens
  misc_feature: Incyte ID No: 1985219CB1
gtgaaagtttgcctgggtcctctcggcgccagagccgctctccgcatcccaggacagcggtgcggccctcggccggggcgcccactccgcagcagccagcgagcgagcgagcgagcgagggcggccgacgcgcccggccgggacccagctgcccgtatgaccgcgccgggcgccgccgggcgctgccctcccacgacatggctgggctccctgctgttgttggtctgtctcctggcgagcaggagtatcaccgaggaggtgtcggagtactgtagccacatgattgggagtggacacctgcagtctctgcagcggctgattgacagtcagatggagacctcgtgccaaattacatttgagtttgtagaccaggaacagttgaaagatccagtgtgctaccttaagaaggcatttctcctggtacaatacataatggaggacaccatgcgcttcagagataacacccccaatgccatcgccattgtgcagctgcaggaactctctttgaggctgaagagctgcttcaccaaggattatgaagagcatgacaaggcctgcgtccgaactttctatgagacacctctccagttgctggagaaggtcaagaatgtctttaatgaaacaaagaatctccttgacaaggactggaatattttcagcaagaactgcaacaacagctttgctgaatgctccagccaagatgtggtgaccaagcctgattgcaactgcctgtaccccaaagccatccctagcagtgacccggcctctgtctcccctcatcagcccctcgccccctccatggcccctgtggctggcttgacctgggaggactctgagggaactgagggcagctccctcttgcctggtgagcagcccctgcacacagtggatccaggcagtgccaagcagcggccacccaggagcacctgccagagctttgagccgccagagaccccagttgtcaaggacagcaccatcggtggctcaccacagcctcgcccctctgtcggggccttcaaccccgggatggaggatattcttgactctgcaatgggcactaattgggtcccagaagaagcctctggagaggccagtgagattcccgtaccccaagggacagagctttccccctccaggccaggagggggcagcatgcagacagagcccgccagacccagcaacttcctctcagcatcttctccactccctgcatcagcaaagggccaacagccggcagatgtaactggtacagccttgcccagggtgggccccgtgaggcccactggccaggactggaatcacaccccccagaagacagaccatccatctgccctgctcagagaccccccggagccaggctctcccaggatctcatcactgcgcccccagggcctcagcaacccctccaccctctctgctcagccacagctttccagaagccactcctcgggcagcgtgctgccccttggggagctggagggcaggaggagcaccagggatcggaggagccccgcagagccagaaggaggaccagcaagtgaaggggcagccaggcccctgccccgttttaactccgttcctttgactgacacaggccatgagaggcagtccgagggatcctccagcccgcagctccaggagtctgtcttccacctgctggtgcccagtgtcatcctggtcttgctggccgtcggaggcctcttgttctacaggtggaggcggaggagccatcaagagcctcagagagcggattctcccttggagcaaccagagggcagccccctgactcaggatgacagacaggtggaactgccagtgtagagggaattctaagctggacgcacagaacagtctctccgtgggaggagacattatggggcgtccaccaccacccctccctggccatcctcctggaatgtggtctgccctccaccagagctcctgcctgccaggactggaccagagcagccaggctggggcccctctgtctcaac

SEQ ID NO: 567 - DNA, 2743 bp, Homo sapiens
  misc_feature: Incyte ID No: 382911.9
tccttgtcctggcactgcctctagacttttcctctctggcccaagttgttcctcttcagctagctctgccctactgtcttgaacatcatatgtgatgcccctctgatgaaatgaaagattcttctttgctagtgttagcaggaatcaccctttgttcactggaccaaggccaatgagatgacctcgcctgaggaggggtccaaagacattcaagtgcccgcttcgctccttgtcagagccctctgcttgagcagtaacccctcttcccagccctgcccagacctctcccgggccccgttatcttccactgaggccctgattccccaggaggaggtaggaggtgaggccagttgggccagaggcctgggctggtgccagagaaagctgcctggtctctctgtggtgtctggaaaggccagggaagggaggaaaggaagtcctgcctgcagcaccgccagcagcccacaggaatgccacacctcccaatccatgtcctcaacgaccctccccgcattcccactctgctgactagcctttccttctctcccacagctggacgcacagaacagtctctccgtgggaggagacattatggggcgtccaccaccacccctccctggccatcctcctggaatgtggtctgccctccaccagagctcctgcctgccaggactggaccagagcagccaggctggggcccctctgtctcaacccgcagacccttgactgaatgagagaggccagaggatgctccccatgctgccactatttattgtgagccctggaggctcccatgctgcttgaggaacggctggtgagcccggctcaggaccctcttccctcaggggctgcaccctcctctcactcccttccatgccggaacccaggccagggacccaccggcctgtggtttgtgggaaagcagggtggacgctgaggagtgaaagaaccctgcacccagagggcctgcctggtgccaaggtatcccagcctggacaggcatggacctgtctccagagagaggagcctgaagttcgtggggcgggacagcgtcggcctgatttcccgtaaaggtgtgcagcctgagagacgggaagaggaggcctctggacctgctggtctgcactgacagcctgaagggtctacaccctcggctcacctaagtgccctgtgctggttgccaggcgcagaggggaggccagccctgccctcaggacctgcctgacctgccagtgatgccaagagggggatcaagcactggcctctgcccctcctccttccagcacctgccagagcttctccaggaggccaagcagaggctcccctcatgaaggaagccattgcactgtgaacactgtacctgcctgctgaacagcctgcccccgtccatccatgagccagcatccgtccgtcctccactctccagcctctccccagcctcctgcactgagctggcctcaccagtcgactgagggagcccctcagccctgaccttctcctgacctggcctttgactccccggagtggagtggggtgggagaacctcctgggccgccagccagagccggtctttaggctgtgttgttcgcccaggtttctgcatcttgcactttgacattcccaagagggaagggactagtgggagagagcaagggaggggagggcacagacagagaggctacagggcgagctctgactgaagatgggcctttgaaatataggtatgcacctgaggttgggggagggtctgcactcccaaaccccagcgcagtgtcctttccctgctgccgacaggaacctggggctgagcaggttatccctgtcaggagccctggactgggctgcatctcagccccacctgcatggtatccagctcccatccacttctcacccttctttcctcctgaccttggtcagcagtgatgacctccaactctcacccaccccctctaccatcacctctaaccaggcaagccagggtgggagagcaatcaggagagccaggcctcagcttccaatgcctggagggcctccacgttgtggccagcctgtggtggtggctctgaggcctaggcaacgagcgacagggctgccagttgcccctgggttcctttgtgctgctgtgtgcctcctctcctgccgccctttgtcctccgctaagagaccctgccctacctggccgctgggccccgtgactttcccttcctgcccaggaaagtgagggtcggctggccccaccttccctgtcctgatgccgacagcttagggaagggcagtgaacttgcatatggggcttagccttctagtcacagcctctatatttgatgctagaaaacacatatttttaaatggaagaaaaataaaaaggcattcccccttcatccccctaccttaaacatataatattttaaaggtagggggatgaagggggaatgccttaaacatataatattttaaaggtcaaaaaagcaatccaacccactgcagaagctctttttgagcacttggtggcatcagagcaggaggagccccagagccacctctggtgtccccccaggctacctgctcaggaaccccttctgttctctgagaagtcaagagaggacattggctcacgcactgtgagattttgtttttatacttggaagtggtgaattattttatataaagtcatttaaatatctatttaaaagataggaagctgcttatatatttaataataaaagaagtgcacaagctgcca

SEQ ID NO: 568 - DNA, 2225 bp, Homo sapiens
  misc_feature: Incyte ID No: 1194750.6
ggggcggaaagtccctgggcgcctgccaggaacactcagctcataataacctcgcggaaaacaccgcggcctcggcctccagaaaccccggccttgcgcaatcccccgcagcccgcgcctccctgggccccacgcggtgcactcaccacccctggggtttttccctctcttccccacaggttcctgcacttggccatcatccatgaagaaaaggcactgaccatggaagtgatccgccaggtgaagggagacctggccttcctcaacttccagaacaacctgcagcagactccactccacttggctgtgatcaccaaccagccagaaattgctgaggcacttctgggagctggctgtgatcctgagctccgagactttcgaggaaatacccccctacaccttggcctgtgagcagggctgcctggccagcgtgggagtcctgactcagtcctgcaccaccccgcacctccactccatcctgaaggctaccaactacacaaagaagtttttgggggcacggggaacgctttttaaaaaagcttttgggggcgttttcaagttagaacacagtcacctgccctgaccgccaccccctcggagggcaggtgacgtggagaaggggcaggtgcgccaacttaaggagtccaggcaagagcttaaactcctaacatttggaaggttgagaaaatatgtgtgcaaagtgcctattggatgcctttataaagttctttcagaacccagactgtgggttcttaaaattcagaagataagactacttgttccataaaagaataggtgaaaggagtgagggttgaaacaggtgattatacttttttccttttgttcttccaggccacacgtgtctacacttagcctctatccatggctacctgggcatcgtggagcttttggtgtccttgggtgctgatgtcaatgctcaggttggtgcttcctgcctccgacgcactgagtcaggctcctcgtgcttatgttgtgagcagaaattccaaatgcagccataagcatctcaaattccttttggtttcaggagccctgtaatggccggactgcccttcacctcgcagtggacctgcaaaatcctgacctggtgtcactcctgttgaagtgtggggctgatgtcaacagagttacctaccagggctattctccctaccagctcacctggggccgcccaagcacccggatacagcagcagctgggccagctgacactagaaaaccttcagatgctgccagagagtgaggatgaggagagctatgacacagagtcagagttcacggagttcacagaggacgaggtgagtctgtgaactccttcggcgctctaactaatgaggtgccattcccttcaccctcccaggcccctagagctgctccttatcagaggggtatctacataatgagtctctcaaatttctgtgcataaccagtatcccaagaatgtacctgccccccccctttttttaatagcttactctttttttaaagagaagcattaaaggcaaactccctcagcctgtaaagttcattatatttgggctatggagaatggagtccaagagttatttccagtagtggcctccccatcccggtagcttggcagagctccgctccggaagcttaacgtgtcttttttccccttgttttcagctgccctatgatgactgtgtgtttggaggccagcgtctgacgttatgagcgcaaaggggctgaaagaacatggacttgtatatttgtacaaaaaaaaagttttatttttctaaaaaaagaaaaaagaagaaaaaatttaaagggtgtacttatatccacactgcacactgcctggcccaaaacgtcttattgtggtaggatcagccctcattttgttgcttttgtgaactttttgtaggggacgagaaagatcattgaaattctgagaaaacttcttttaaacctcacctttgtggggtttttggagaaggttatcaaaaatttcatggaaggaccacattttatatttattgtgcttcgagtgactgaccccagtggtatcctgtgacatgtaacagccaggagtgttaagcgttcagtgatgtggggtgaaaagttactacctgtcaaggtttgtgttaccctcctgtaaatggtgtacataatgtattgttggtaattattttggtacttttatgatgtatatttattaaacagatttttacaaatgaaaaa

SEQ ID NO: 569 - DNA, 2412 bp, Homo sapiens
  misc_feature: Incyte ID No: 1194750.7
  unsure 60, 70, 82, 104, 1750: a, t, c, g, or other
gaggacgaagccagttctctttttctggtctgactggcttggaaattccccgagcctgancccgccccanagaaatccccanccagcgtttatagggcgccgcngcggcgctgcagagcccacagcagtccgtgccgccgtcccgcccgccagcgccccagcgaggaagcagcgcgcagcccgcggcccagcgcacccgcagcagcgcccgcagctcgtccgcgccatgttccaggcggccgagcgcccccaggagtgggccatggagggcccccgcgacgggctgaagaaggagcggctactggacgaccgccacgacagcggcctggactccatgaaagacgaggagtacgagcagatggtcaaggagctgcaggagatccgcctcgagccgcaggaggtgccgcgcggctcggagccctggaagcagcagctcaccgaggacggggactcgttcctgcacttggccatcatccatgaagaaaaggcactgaccatggaagtgatccgccaggtgaagggagacctggctttcctcaacttccagaacaacctgcagcagactccactccacttggctgtgatcaccaaccagccagaaattgctgaggcacttctgggagctggctgtgatcctgagctccgagactttcgaggaaatacccccctacaccttgcctgtgagcagggctgcctggccagcgtgggagtcctgactcagtcctgcaccaccccgcacctccactccatcctgaaggctaccaactacaatggccacacgtgtctacacttagcctctatccatggctacctgggcatcgtggagcttttggtgtccttgggtgctgatgtcaatgctcaggagccctgtaatggccggactgcccttcacctcgcagtggacctgcaaaatcctgacctggtgtcactcctgttgaagtgtggggctgatgtcaacagagttacctaccagggctattctccctaccagctcacctggggccgcccaagcacccggatacagcagcagctgggccagctgacactagaaaaccttcagatgctgccagagagtgaggatgaggagagctatgacacagagtcagagttcacggagttcacagaggacgagctgccctatgatgactgtgtgtttggaggccagcgtctgacgttatgagcgcaaaggggctgaaagaacatggacttgtatatttgtacaaaaaaaaagttttatttttctaaaaaaagaaaaaagaagaaaaaatttaaagggtgtacttatatccacactgcacactgcctggcccaaaacgtcttattgtggtaggatcagccctcattttgttgcttttgtgaactttttgtaggggacgagaaagatcattgaaattctgagaaaacttcttttaaacctcacctttgtggggtttttggagaaggttatcaaaaatttcatggaaggaccacattttatatttattgtgcttcgagtgactgaccccagtggtatcctgtgacatgtaacagccaggagtgttaagcgttcagtgatgtggggtgaaaagttactacctgtcaaggtttgtgttaccctcctgtaaatggtgtacataatgtattgttggtaattattttggtacttttatgatgtatatttattaaacagatttttacaaatgagttatcctgatcattttcttcaggctgccgtgggcctccggttctgaagttccatcctccggcagangtggaggtggagcagtgtgagggaggaggtaactcccagcagcttctcacacctgacacccagcctccagcaaagctttgcaggcaccctgggcccagtgtgtgggagggaggctgttgcaaggttataggaaattaccaatctcaggcttggggtggaagcatgctgtttggcctgtggttggagacctctccattgtcattctgtcatcccgttgatttaaacttcctggaccctaattgccagttgaggaaattattttggccaagaagaatatgctgaattcatatagagctgggaaagatctcactaatacaggaagttcctaaggacataggctcagaaatgggactgcactgacatttgttagcagatgctcacctactgagcctcagttttctcatttattagctgggctgttgtgaaaattacataagacaatccacgtaaaatgcatagcagagcggcaggcacgtagtgctaaagaaaaacaagctgttacgcaacgttctttatgtcataccaggagaaacaagtccagagagaatgtcctgtctagggtcaccttgcaggagaaataggtggttaacatatttcatacgtgctcgtttaggggtaaacatcttttaagagcatccatctcttaaatctatgtgttattg

SEQ ID NO: 570 - DNA, 1740 bp, Homo sapiens
  misc_feature: Incyte ID No: 1648579CB1
  unsure 60, 70, 82, 104, 1679, 1685, 1688, 1691-1693, 1696-1697, 1703, 1716,1738: a, t, c, g, or other
gaggacgaagccagttctctttttctggtctgactggcttggaaattccccgagcctgancccgccccanagaaatccccanccagcgtttatagggcgccgcngcggcgctgcagagcccacagcagtccgtgccgccgtcccgcccgccagcgccccagcgaggaagcagcgcgcacccgcggcccagcgcacccgcagcagcgcccgcagctcgtccgcgccatgttccaggcggccgagcgcccccaggagtgggccatggagggcccccgcgacgggctgaagaaggagcggctactggatgaccgccacgacagcggcctggactccatgaaagacgaggagtacgagcagatggtcaaggagctgcaggagatccgcctcgagccgcaggaggtgccgcgcggctcggagccctggaagcagcagctcaccgaggacggggactcgttcctgcacttggccatcatccatgaagaaaaggcactgaccatggaagtgatccgccaggtgaagggagacctggccttcctcaacttccagaacaacctgcagcagactccactccacttggctgtgatcaccaaccagccagaaattgctgaggcacttctgggagctggctgtgatcctgagctccgagactttcgaggaaatacccccctacaccttgcctgtgagcagggctacctgggcatcgtgggagtcctgactcagtcctgcaccaccccgcacctccactccatcctgaaggctaccaactacaatggccacacgtgtctacacttagcctctatccatggctacctgggcatcgtggagcttttggtgtccttgggtgctgatgtcaatgctcaggagccctgtaatggccggactgcccttcacctcgcagtggacctgcaaaatcctgacctggtgtcactcctgttgaagtgtggggctgatgtcaacagagttacctaccagggctattctccctaccagctcacctggggccgcccaagcacccggatacagcagcagctgggccagctgacactagaaaaccttcagatgctgccagagagtgaggatgaggagagctatgacacagagtcagagttcacggagttcacagaggacgagctgccctatgatgactgtgtgtttggaggccagcgtctgacgttatgagcgcaaaggggctgaaagaacatggacttgtatatttgtacaaaaaaaaagttttatttttctaaaaaaagaaaaaagaagaaaaaatttaaagggtgtacttatatccacactgcacactgcctagcccaaaacgtcttattgtggtaggatcagccctcattttgttgcttttgtgaactttttgtaggggacgagaaagatcattgaaattctgagaaaacttcttttaaacctcacctttgtggggtttttggagaaggttatcaaaaatttcatggaaggaccacattttatatttattgtgcttcgagtgactgaccccagtggtatcctgtgacatgtaacagccaggagtgttaagcgttcagtgatgtggggtgaaaagttactacctgtcaaggtttgtgttaccctcctgtaaatggtgtacataatgtattgttggtaattattttggtacttttatgatgtatatttattaaacagatttttacaantgtaanaanaannnaannataatnaacagaataccanaggaggaaataaagcacactcngg

SEQ ID NO: 571 - DNA, 670 bp, Homo sapiens
  misc_feature: Incyte ID No: 444619.6
tggctttttctcttctagcaggtgtctcctgcacctgcgccagttcctgcaagtgcaaagagtgcaaatgcacctcctgcaagaagagtgagtgcggggccatctccaggaatctggggctgtggctaaggttgggagggaacccaaggctgtccctgagtgcgtgcttctggggaaccggccttcctttgtccctgtaggttgtcactgcctgtctagtcttctgcactttccagggcttatgtgaggtggggcagctttctcaaaggaagacccattccaatgtccaccagttgtctcctgacaaaaaccatgccatcatgaactaagggtcctctggggctggagggatggagacaggcctctgttggggcagggagttctctgatcgagtctgctctgacctctcaatctcctttcctccccaggctgctgctcctgctgccctgtgggctgtgccaagtgtgcccagggctgcatctgcaaaggggcatcggagaagtgcagctgctgcgcctgatgtcgggacagccctgctcccaagtacaaatagagtgacccgtaaaatccaggattttttgttttttgctacaatcttgacccctttgctacattcctttttttctgtgaaatatgtgaataataattaaacacttagacttgaaaaaaa

SEQ ID NO: 572 - DNA, 1237 bp, Homo sapiens
  misc_feature: Incyte ID No: 1329816.1
  unsure 99: a, t, c, g, or other
gggagtggagctcaggggttggtgcccccggcccttctgctgcgcacaggccagcccaggaccgctgggggctcgaacccagcggggcgggtgcaagcncggggcaaggcctctgcgcccggcccccttccttgagtaggaaagcagccgcaggttgtggcgctccaccacgccgtccacgtgcgccttgcggtctctccatttatcgcttgagatctccagccttaccgcggctcgaaatggaccccaactgctcctgcaccactggtaagagaagccgaccctgcgccctaggaatcccatttcccagccccagtactgagggtctctgggtttgaggaggtcgcatttaagttctgagcggaagggaattcctttacttccttaggtgctttcttcctgatctcccctctgagagcactgccctccctcctgggcctctgagtcagagttaaggatactgagggtcaaggcagtcccgctccacatcacccagttggttagggtcctgctggctgggccccagtgttctcctccaggctctgagcaatcagggtggactgggggctggagacatttgagtcttcagggttcagcacagaaggttctggctggcaatctcagtattcctgggttgggtgtgcccctgggaccttcctggtagggtaaaacaggagggtgcttgcccttcccagcgttagtggagaggacaggggctttccctgagtgggaaaggagctctgagggctggccctgcacagaggagggggcactggagactcattgacccattgctgtaccttcttcatctcactcactgcccactgcgtttttctcatccttgcaggtgtctcctgcgcctgcaccggctcctgcaagtgcaaagagtgcaaatgcacctcctgcaagaagagtgagtgcggggccatctccaggaatctggggctgtggctgagattgggagggaacccaaggctggccctgagtgcatccttctggggaactgggctttctttgccctcattgcccgtgtcattccctctccaggctttctgccctaaattcagatggggcaggacagcatttttctcttgggacacaaatcccaactgtagcatctatggtttcagaacagagctgtgccagacgtaaaaagcttcctctgggtctgggttctgagctccagccaggcttgctattggggcacgacggtgcccggtcaagtctactgtctctc

SEQ ID NO: 573 - DNA, 1869 bp, Homo sapiens
  misc_feature: Incyte ID No: 199958.6
gaattcgagaggcctctggggtgggatcgcgggccgtaagtggctgtggagctggggtcactgcgcggtgggaccatggcctcggagaagccgctggcggcagtcacttgtacagcgccggtcaacatcgcggtcatcaagtactggggcaagcgcgatgaagagctggttctgcccatcaactcctccctgagcgtcactctgcaccaggaccagttaaaaaccaccacaacagccgtcatcagcaaggacttcaccgaggaccggatttggctgaatggccgggaggaggatgtggggcagccgcggctgcaggcctgcctgcgggagatccgctgcctggcccggaagcggaggaactcacgggatggggacccgctgccctccagcctcagctgcaaggtgcacgtggcatcggtgaacaacttccccacggctgcgggcctggcctcctcagcggcgggctatgcctgcctagcctacaccctggcccgtgtctacggcgtggagagtgacctctcagaagtggctcgccggggctcaggcagcgcctgccggagcctgtatgggggctttgtggagtggcagatgggagagcaggccgacgggaaggacagcatcgctcggcaagtggcccccgagtcacactggcctgaactccgcgtgctcatccttgtggtgagcgctgagaagaagctgacaggcagtaccgtgggcatgcgggccagtgtggagaccagccccctgcttcggttccgggccgagtccgtggtgcccgcgcgcatggcggagatggcccgctgcatccgggagcgagacttccccagcttcgcccagctgaccatgaaggacagcaaccagttccacgccacctgcctcgacaccttcccgcccatctcttacctcaatgccatctcctggcgcatcatccacctggtgcaccgcttcaacgcccaccacggggacaccaaggtggcgtacacctttgacgcgggccccaatgccgtgatcttcaccctggacgacactgtggctgagtttgtggctgctgtgtggcacggctttcccccaggctcgaatggagacacgtttctgaaggggctgcaggtgaggccggcccctctctcagctgagcttcaggctgcgctggccatggagccgacccccggtggggtcaaatacatcattgtcactcaggtggggccagggcctcaaatcctggatgacccctgcgcccacctcctgggtcctgacggcctgccgaagccagctgcctgactgcctcagcagggaccgcatgccgcttggagaaggggtggcctcgccggagctagggagcggatgtggtgggctggccggactcctgggacatgtgggtggtggcttgaccccgggcccatgggcagcttgctgtggggcagtgcagggagtcctgcggccgcccaggtgtcaggagaggtccccgccgagtgcttcagctgccctaagctgcaccagcgctttgccaagatgggatggggagggggtatgagaactggcagagcctcggtgcagcagggctgaagggctttctcaccccagctctggctatgcccagttctctgagaaaggagctcagtggggaggtggtccctccagcggaccagggaaggggtcaccgtgctgggagcagcctccttgggcctcaggaaaccaccaagtgcctcggatggtggctgcccacggcgcttctgctgagaccctgcccccggcccaggtgtctcggagggtggctgcccacggcctgggtgtggctggaatggtggcaggagtgggcaccagtgcggccccggtggccatggggaataaaccagcattgctgcctccggc

SEQ ID NO: 574 - DNA, 1057 bp, Homo sapiens
  misc_feature: Incyte ID No: 443762CB1
gccgcagcacctcctcgccagctcttcctctcctctcacagccgccagacccgcctgctgagccccatggcccgcgctgctctctccgccgcccccagcaatccccggctcctgcgagtggcgctgctgctcctgctcctggtagccgctggccggcgcgcagcaggagcgtccgtggccactgaactgcgctgccagtgcttgcagaccctgcagggaattcaccccaagaacatccaaagtgtgaacgtgaagtcccccggaccccactgcgcccaaaccgaagtcatagccacactcaagaatgggcggaaagcttgcctcaatcctgcatcccccatagttaagaaaatcatcgaaaagatgctgaacagtgacaaatccaactgaccagaagggaggaggaagctcactggtggctgttcctgaaggaggccctgcccttataggaacagaagaggaaagagagacacagctgcagaggccacctggattgtgcctaatgtgtttgagcatcgcttaggagaagtcttctatttatttatttattcattagttttgaagattctatgttaatattttaggtgtaaaataattaagggtatgattaactctacctgcacactgtcctattatattcattctttttgaaatgtcaaccccaagttagttcaatctggattcatatttaatttgaaggtagaatgttttcaaatgttctccagtcattatgttaatatttctgaggagcctgcaacatgccagccactgtgatagaggctggcggatccaagcaaatggccaatgagatcattgtgaaggcaggggaatgtatgtgcacatctgttttgtaactgtttagatgaatgtcagttgttatttattgaaatgatttcacagtgtgtggtcaacatttctcatgttgaaactttaagaactaaaatgttctaaatatcccttggacattttatgtctttcttgtaaggcatactgccttgtttaatggtagttttacagtgtttctggcttagaacaaaggggcttaattattgatgtt

SEQ ID NO: 575 - DNA, 1104 bp, Homo sapiens
  misc_feature: Incyte ID No: 246574.11
cgggccgcaggcacctgcctcgccagctcttccgctcctctcacagccgccagacccgcctgctgagccccatggcccgcgctgctctcttccgccgcccccagcaatccccggctcctgcgagtggcgctgctgctcctgctcctggtagccgctggccggcgcgcagcaggagcgtccgtggccactgaactgcgctgccagtgcttgcagaccctgcagggaattcaccccaagaacatccaaagtgtgaacgtgaagtcccccggaccccactgcgcccaaaccgaagtcatagccacactcaagaatggggcggaaagcttgcctcaatcctgcatcccccatagttaagaaaatcatcgaaaagatgctgaacagtgacaaatccaactgaccagaagggaggaggaagctcactggtggctgttcctgaaggaggccctgcccttataggaacagaagaggaaagagagacacagctgcagaggccacctggattgtgcctaatgtgtttgagcatcgcttaggagaagtcttctatttatttaattattcattagttttgaagattctatgttaatattttaggtgtaaaataattaagggtatgattaactctacctgcacactgtcctattatattcattctttttgaaatgtcaaccccaagttagttcaatctggattcatatttaatttgaaggtagaatgttttcaaatgttctccagtcattatgttaatatttctgaggagcctgcaacatgccagccactgtgatagaggctggcggatccaagcaaatggccaatgagatcattgtgaaggcaggggaatgtatgtgcacatctgttttgtaactgtttagatgaatgtcagttgttatttattgaaatgatttcacagtgtgtggtcaacatttctcatgttgaaactttaagaactaaaatgttctaaatatcccttggacattttatgtctttcttgtaaggcatactgccttgtttaatggtagttttacagtgtttctggcttagaacaaaggggcttaattattgatgttttcatagagaatataaaaataaagcacttatagaaaaaaa

SEQ ID NO: 576 - DNA, 1571 bp, Homo sapiens
  misc_feature: Incyte ID No: 1382902.13
  unsure 1568: a, t, c, g, or other
cgcacccacccggactcagaatctcctcagacgccgagatgcgggtcacggcgccccgaaccctcctcctgctgctctggggggcagtggccctggaccgagacctgggccggctcccactccatgaggtatttctacaccgccatgtcccggcccggccgcggggagccccgcttcatcaccgtgggctacgtggacgacacgctgttcgtgaggttcgacagcgacgccacgagtccgaggaaggagccgcgggcgccatggatagagcaggaggggccggagtattgggaccgggagacacagatctccaagaccaacacacagacttaccgagagagcctgcggaacctgcgcggctactacaaccagagcgaggccgggtctcacaccctccagaggatgtttggctgcgacgtggggccggacgggcgcctcctccgcgggtaccaccaggacgcctacgacggcaaggattacatcgccctgaacgaggacctgagctcctggaccgccgcggacacggcggctcagatcacccagcgcaagtgggaggcggcccgtgtggcggagcagctgagagcctacctggagggcgagtgcgtggagtggctccgcagatacctggagaacgggaaggagacgctgcagcgcgcggaccccccaaagacacacgtgacccaccaccccatctctgaccatgaggccaccctgaggtgctgggccctgggcttctaccctgcggagatcacactgacctggcagcgggatggcgaggaccaaactcaggacactgagcttgtggagaccagaccagcaggagatagaaccttccagaagtgggcagctgtggtggtgccttctggagaagagcagagatacacatgccatgtacagcatgaggggctgccgaagcccctcaccctgagatgggagccgtcttcccagtccaccatccccatcgtgggcattgttgctggcctggctgtcctagcagttgtggtcatcggagctgtggtcgctgctgtgatgtgtaggaggaagagttcaggtggaaaaggagggagctactctcaggctgcgtgcagcgacagtgcccagggctctgatgtgtctctcacagcttgaaaagcctgagacagctgtcttgtgagggactgagatgcaggatttcttcacgcctcccctttgtgacttcaagagcctctggcatctctttctgcaaaggcacctgaatgtgtctgcgtccctgttagcataatgtgaggaggtggagagacagcccacccttgtgtccactgtgacccctgttcccatgctgacctgtgtttcctccccagtcatctttcttgttccagagaggtggggctggatgtctccatctctgtctcaactttacgtgcactgagctgcaacttcttacttccctactgaaaataagaatctgaatataaatttgttttctcaaatatttgctatgagaggttgatggattaattaaataagtcaattcctggaatttgagagagcaaataaagacctgagaaccttccagaaaaaaaaaaaanggg

SEQ ID NO: 577 - DNA, 1389 bp, Homo sapiens
  misc_feature: Incyte ID No: 1382902.19
cagcgctagaatgtcgccctccgttgaatggagaatggcatgagttttcctgagtttcctctgagggccccctcttctctctagacaattaaggaatgacgtctctgaggaaatggaggggaagacagtccctagaatactgatcaggggtcccctttgacccctgcagcagccttgggaaccgtgacttttcttctcaggccttgttctctgcctcacactcagtgtgtttggggctctgattccagcacttctgagtcactttacctccactcagatcaggagcagaagtccctgttccccgctcagagactcgaactttccaatgaataggagattatcccaggtgcctgcgtccaggctggtgtctgggttctgtgccccttccccaccccaggtgtcctgtccattctcaggctggtcacatgggtggtcctagggtgtcccatgaaagatgcaaagcgcctgaattttctgactcttcccatcagaccccccaaagacacacgtgacccaccaccccatctctgaccatgaggccaccctgaggtgctgggccctgggtttctaccctgcggagatcacactgacctggcagcgggatggcgaggaccaaactcaggacactgagcttgtggagaccagaccagcaggagatagaaccttccagaagtgggcagctgtggtggtgccttctggagaagagcagagatacacatgccatgtacagcatgaggggctgccgaagcccctcaccctgagatgggagccatcttcccagtccaccgtccccatcgtgggcattgttgctggcctggctgtcctagcagttgtggtcatcggagctgtggtcgctgctgtgatgtgtaggaggaagagttcaggtggaaaaggagggagctactctcaggctgcgtccagcgacagtgcccagggctctgatgtgtctctcacagcttgaaaagcctgagacagctgtcttgtgagggactgagatgcaggatttcttcacgcctcccctttgtgacttcaagagcctctggcatctctttctgcaaaggcacctgaatgtgtctgcgtccctgttagcataatgtgaggaggtggagagacagcccacccttgtgtccactgtgacccctgttcccatgctgacctgtgtttcctccccagtcatctttcttgttccagagaggtggggctggatgtctccatctctgtctcaactttacgtgcactgagctgccacttcttacttccctactgaaaataagaatctgaatataaatttgttttctccaatatttgctatgagaggttgatggattaatttaataagtccattcctgggatttgagagagccaattaagacctgagaacctttccag

SEQ ID NO: 578 - DNA, 811 bp, Homo sapiens
  misc_feature: Incyte ID No: 1558664CB1
aaggggcggggctgtcggctgcgcgttgtgcgctgtcccaggttggaaaccagtgccccaggcggcgaggagagcggtgccttgcagggatgctgcgggcgggagcaccaaccggggacttaccccgggcgggagaagtccacaccgggaccaccatcatggcagtggagtttgacgggggcgttgtgatgggttctgattcccgagtgtctgcaggcgaggcggtggtgaaccgagtgtttgacaagctgtccccgctgcacgagcacatctactgtgcactctctggttcagctgctgatgcccaagccgtggccgacatggccgcctaccagctggagctccatgggatagaactggaggaacctccacttgttttggctgctgcaaatgtggtgagaaatatcagctataaatatcgagaggacttgtctgcacatctcatggtagctggctgggaccaacgtgaaggaggtcaggtatatggaaccctgggaggaatgctgactcgacagccttttgccattggtggctccggcagcacctttatctatggttatgtggatgcagcatataagccaggcatgtctcccgaggagtgcaggcgcttcaccacagacgctattgctctggccatgagccgggatggctcaagcgggggtgtcatctacctggtcactattacagctgccggtgtggaccatcgagtcatcttgggcaatgaactgccaaaattctatgatgagtgaaccttccccagacttctctttcttattttgtaataaactctctagggccaaaaaaaaaaaaa

SEQ ID NO: 579 - DNA, 2319 bp, Homo sapiens
  misc_feature: Incyte ID No: 023244.1
  unsure 169, 173: a, t, c, g, or other
gaacagaaaagaaaacaaaggctaattctcaggctctacaccgaacctactggatcagaatccctggagctagggaccagaatctgtttattggtgattctgttgcatgcttttgcactattctaaaacctatgtgtgcatacacacacacacacacacacacacactnactntcttagcccttgttaacccttatcgatcctagacaaatgtatggggaacccatcagaggctattctttagggctagtgttcaatttgactgtttttaatatgaaagattatggatcacatttcaaacagatgtgaacgtggagagaataatacgatgtaccgcagtgtgtccatcactgttcttcagaaattcacattgggtcattttgttttagccatctctttccacattatcttctttttgttcttttaaatttcgggggtaatatgaagcaagcctcagctgggcagaccagagtctgttccctttttatatatcccggcgtcttagccgggtactcgtgtctgaatagtgagtaccttttgggcctggcactgggcaggccttcagctgggtcattctctacctggcgatggctttaggtgagttgtggagctcttttcacctttttgcctcatctgaaaatagttcctggccagaagggagaattggtgagaaaagtttcaacattttaagtctcatgctataagtttgcctgtcttttgtctttcaaggtgaagctattaaatttgttctcagctaccctccatgtcctagcagatagaggacttggtctgaccttcggttgtgatggggcaggttgggaggtgggcggggagtctctgtggtctgggtgctgaggttgacccgatgggcaggtgaagaaaatcaccttctccattccccttgatttctttatcgtgtgccgcacgaggcatgctgaagggacacacacctttccccctttttatttacaaagtagagagctgagaaagacagctcatgttctgttttgttttgtacacattatctttctcaagagatgtgatgtccttaagtaaactgacctgccttcatggcttgtcctgtaatgaatgcgttcaagacagtgttttggggacaggaaagaggcattcttaggtaagcggtggtgggggggtggggtggggtggagaggaaacccttctaggaagtagttcaatgaaaaacctaaaaatgcccaaataaacattcgcttacatattatatatcttgggcttctttttatgacagttcattcagggacccagtcagtaaacaggtagttaacttcgtgtaaccaagcaagggttttgtttatcttttttaaagtagaaaaaagtgaggctcaaactctctctttctccttgtcataactattggtttacagtctttatttgtttaaaagtaaagcacattgtatgtatttatttggcaatacatgaggccattaaaaccctgagcctaaggtaccacagttagtctcatttgcctcttgtcctgtgaactccacttagaatgtcattgaacttgggcagacataattctagtgtctgttccaaacgcactgtgtcacagaagctagaattaccattagaggcacaaacccctgagaatacacaagggggcacgcttccagtagatgtgttggggaaggaggagggcagaggggacaggggacaggattcagctttgtggtgggtcctgagggttcctaccaggggtagccaggatctgggaaacagatcagcgactctagtctgaagtggctgcctggttcgggggctgccttcagcaagattcaggcaggagagacggaaatagccaccttccaggcgtgagtcctggagataaaaatggattttaacctaggactgccgggagctggccctccgcggctgctcagactagggctgtgtgtgctggctctcgcctgtttccggtgtctaactggcttgtttctctttatggcttggcttcattccgacctggggtggggccacatccaacccactgcccactggctgtccgtctggcctgccccgcggttccaaccacagtggtgaagcagcgcttgcagatgtacaactcgcagcaccggtcagcaatcagctgcatccggacggtgtggaggaccgaggggttgggggccttctaccggagctacaccacgcagctgaccatgaacatccccttccagtccatccacttcatcacctatgagttcctgcaggagcaggtcaacccccaccggacctacaacccgcagtcccacatcatctcaggcgggctggccggggccctcgc

SEQ ID NO: 580 - DNA, 1172 bp, Homo sapiens
  misc_feature: Incyte ID No: 1081573.17
  unsure 254, 332: a, t, c, g, or other
ctgtgactggtgctggagttttgagtccacagataaaatgtgtctccttcgtctctactagagaggaaaaagaactggaattggaagaacagggagactgaagggtagcaagagaggctggagaagagagtgaaaagaccgcttacctgatttgaaattgtctgcagcccctctttcctggagtaaatgaactggaccaaatctcaaaaatccacgatgtcatcggcacacccgctcagaagatcctcaccaanttcaaacagtcgagagctatgaattttgattttccttttaaaaagggatcaggaatacctctactaacaaccaatttntccccacaatgcctctccctcctgcacgcaatggtggcctatgatcccgatgagagaatcgccgcccaccaggccctgcagcacccctacttccaagaacagagaaacagtccctaaagcaagaggaggaccgtcccaagagacgaggaccggcctatgtcatggaactgcccaaactaaagctttcgggagtggtcagactgtcgtcttactccagccccacgctgcagtccgtgcttggatctggaacaaatggaagagtgccggtgctgagacccttgaagtgcatccctgcgagcaagaagacagatccgcagaaggacctttaagcctgccccgcagcagtgtcgcctgcccaccatagtgcggaaaggcggaagataactgagcagcaccgtcgtctcgacttcggaggcaacaccaagcccgaccgggccaggcctgggtgatctgctgctgagacgccacggagggctggggatgcgcctgcgtccgtttcgcgctggccggggctctgggtgctgccctgcgccctgccgcacccgcggcccgcgcagctgcctaggatgttctgggctaatatacttgtaaaaccaccgcattctagggttttctttcattttcgttaagaatttggggcaggaaatactttgtaactttgtatatgaatcaaaacaaacgagcaggcatttctgtgatgtgttgggcgtggttggaaggtgggttctgcgtgtcccttcccagcgctgctggtcagtcgtggagcgccatcatgtcttaccagtgacgctgctgacacccctgacttttattaaagaataagctgtcgttacaaaaaaa

SEQ ID NO: 581 - DNA, 870 bp, Homo sapiens
  misc_feature: Incyte ID No: 2883526CB1
cccacgcgtccgccagaaaccttcacctctcatgctgaagctcacacccttgccctccaagatgaaggtttctgcagcgcttctgtgcctgctgctcatggcagccactttcagccctcagggacttgctcagccagattcagtttccattccaatcacctgctgctttaacgtgatcaataggaaaattcctatccagaggctggagagctacacaagaatcaccaacatccaatgtcccaaggaagctgtgatcttcaagaccaaacggggcaaggaggtctgtgctgaccccaaggagagatgggtcagggattccatgaagcatctggaccaaatatttcaaaatctgaagccatgagccttcatacatggactgagagtcagagcttgaagaaaagcttatttattttccccaacctcccccaggtgcagtgtgacattattttattataacatccacaaagagattatttttaaataatttaaagcataatatttcttaaaaagtatttaattatatttaagttgttgatgttttaactctatctgtcatacatcctagtgaatgtaaaatgcaaaatcctggtgatgtgttttttgtttttgttttcctgtgagctcaactaagttcacggcaaaatgtcattgttctccctcctacctgtctgtagtgttgtggggtcctcccatggatcatcaaggtgaaacactttggtattctttggcaatcagtgctcctgtaagtcaaatgtgtgctttgtactgctgttgttgaaattgatgttactgtatataactatggaattttgaaaaaaaatttcaaaaagaaaaaaatatatataatttaaaactaaaaaaaaaaaaaaa

SEQ ID NO: 582 - DNA, 1087 bp, Homo sapiens
  misc_feature: Incyte ID No: 1291998.1
taagcctcttagttcacatctgtggtcagtctgggcttaatggcaccccatcctccccatttgctcatttggtctcagcagtgaatggaaaaagtgtctcgtcctgaccccctgcttccctttcctacttcctggaaatcccaggatgctgcatttgctcagcagatttaacagcccacttatcactcatggaagatccctcctcctgcttgactccgccctctctccctcttgccgctttcaataagaggcagagacagcagccagaggaaccgagaggctgagactaaccccagaaacatccaattctccaaactgaagctcggcactctcgccttccagcatggaaagtgctctggccgccctttctgtggccggtgctcatagcaagccaactttaattccccaagggcctcgctcatgccatgatgcaatcaaatgcccccagtcaacctgctgttataacttgcaccaatagggaagatctcagtgccagaggcttgcggagctatagaagaatcaccagccagcaaggtgttcccaaggaagctgtggatcttcaaagaccattgtgggccaagggggatctgtggctggaccccaaggcagaagtggggttcaggattccatggacccacctgggacaatgcaaacccaaactccttgaagacttgaagcactcacgtccacaacccaagaagtctgcagctaacttattttccccctagcttgtccccagacaccctgttttattttattataatagaattttgtttgttgaatgtgaaacattatgccattaaagtaatcgttaattcttaatttaagttattgatgttttaagtttatcctttccatggtacctagtgtttttttagatacagagacttggggaaattgcttttcctcttttgaaccacagttctaacccctggggatgtttttgagggtctttgcaagaatcattaatacaaagaatttttttttaacaattccaatggcattgctaaaatattattgtggaaatgaatattttgtcaactattacacccaaataaatatatttttgtacaaaaaaaaaaaaaaa

SEQ ID NO: 583 - DNA, 804 bp, Homo sapiens
  misc_feature: Incyte ID No: 452327CB1
gagaggaacagaaaggataaggatgctttcgaacagcaactgctttcttaattaaatggtagagatcttccagaaacatccaattctcaaactgaagctcgcactctcgcctccagcatgaaagtctctgccgcccttctgtgcctgctgctcatagcagccaccttcattccccaagggctcgctcagccagatgcaatcaatgccccagtcacctgctgttataacttcaccaataggaagatctcagtgcagaggctcgcgagctatagaagaatcaccagcagcaagtgtcccaaagaagctgtgatcttcaagaccattgtggccaaggagatctgtgctgaccccaagcagaagtgggttcaggattccatggaccacctggacaagcaaacccaaactccgaagacttgaacactcactccacaacccaagaatctgcagctaacttattttcccctagctttccccagacaccctgttttattttattataatgaattttgtttgttgatgtgaaacattatgccttaagtaatgttaattcttatttaagttattgatgttttaagtttatctttcatggtactagtgttttttagatacagagacttggggaaattgcttttcctcttgaaccacagttctacccctgggatgttttgagggtctttgcaagaatcattaatacaaagaattttttttaacattccaatgcattgctaaaatattattgtggaaatgaatattttgtaactattacaccaaataaatatatttttgtacaaaaaaaaaaaaaaa

SEQ ID NO: 584 - DNA, 583 bp, Homo sapiens
  misc_feature: Incyte ID No: 2685676CB1
ccctgtaggtgctgtccttgctgtcctgctctgtgacactctcctgggagtcacccgattggagggcgttatccaccttccactgtactttggcctctctgggatagaagttattcagcaggcacacaacagaggcagttccagatttcaactgctcatcagatggcgggaagatgaagacagatggtgcagccacagttcgtttgatctccagctcgagccgctgcgtgttttcctcttgatcgggaactcctgcttctccttgcctcgaaatggaccccaactgctcctgctcgcctgttggctcctgtgcctgtgccggctcctgcaaatgcaaagagtgcaaatgcacctcctgcaagaagagctgctgctcctgctgccctgtgggctgtgccaagtgtgcccagggctgcatctgcaaaggggcatcagagaagtgcagctgctgtgcctgatgtccggacagccctgctcgaagatatagaaagagtgacctgcacaaacttggaattttttttccatacaaccctgccccatctactgtattttttttaatgaaatatgtgaatgataatagtca

SEQ ID NO: 585 - DNA, 1568 bp, Homo sapiens
  misc_feature: Incyte ID No: 347357.2
aaattatccagcaagctttcattaacgtggccaaaaaacattttggcgaatttttcaaccttaaccaaactgttcaggtaagcacccagagttcacttgctagtcacctggaccactggctgtttaaccttgagagaagttggatattcactgtcatttggaaccatgaggccagggatgtaatggcaggctggcgaggctggcagggctggcggggctggtggagctggtgactccaggagcacctgcctgcctggcttctgctcaggaggcggcttcactccccaggagaaatgaaatgcggcccgtgccctgccatctgttctgcacgaccttacgcaggatgtggggctccaccgaggactggctggtaggctgaatctttttcaagcataaagcacagcattgtttactagtcctactcccaaatttgtatgtttgactcaaagatgttgccgtagctctgtgggtttctacttagcaactcttcccccgagttaccttcagcaaaggcaagagagggcatgtggcacttgggctgtagataaaattcctcttctgcccaggcctgggctggtggattgaaatctcattccatagtgcaggcaagcaagaaggacaattttcgtcatttttccgtcatataaattaatttcttctttcaccctttttgcctgttagtgaaaattaaatcccagttctgactcccgcccactttctcaggggctgtgtctgagtcccgggtgcctgctcatggggtgggtgacctgcctggtccccagtcaccaagatgtccattgtccttcccgggccttggtccccttggtccctgagctcctgcccagccccgccgggacacaggaagcactcggctgcaggcccaactgctctgggccatgggaactctggcatccaccaagggccttcacctcttttgtgctgcccttggatagacacagccttgcagcagctcccggctcctcaccagggactgcggggctctccaaggccatgacctgcacactgccctcagccacaacagagcctggggggctcgctgcctcctgtgtcacaaatcttgaggagtgcggcacaggccacttctgctcccagagggtctactgtcctttgttgtgtagaccgaaagtgactgaggcagatctgcctcgatccgagatttattttgcccaggtcgaggatgtacgtgggaaaaagaaatacaagttccagtgctatctgtgacctgtgcttttcctaagagggtttaggggaacttcagtatttaaaaaggaaagagcgagcaggtggggaagaaagaaggaaggagggtaggcaatgaggcaatgaggcagaggtcaccctcgtgtaaggctctgaccagcactcagtgaatctatgtgttaaatgtgaaaagaaaggcgtggagagaaagtcaatcatgcattcatctcgcgctcagtaaatctacattttacatcggataaagtgcacatgtgaaatcacagcttctgtttgggaacaaaagaaaggcagttaactttccctttagtatagtaagtttggggtcc

SEQ ID NO: 586 - DNA, 3305 bp, Homo sapiens
  misc_feature: Incyte ID No: 347357.1
gggacaggagaggagctgaatcctgagattgtatcgctaggagcccccaaagtacgatgacggtcctcgggccagcatgggggtgcattggcaccatgtaaggaaaggggccctcccgtggcaccgttggagtggggcggtgtggggttgttcggagagaaaagtttcccatgagctctgtttcagcaaacggcgatgaccactttcgtggcaactaaacagtcttgccttcctgcacgtggacatttttcttcatgcatatttctcttgcaaatggttctattgtttgtataacagtatttcatgagcggagaagagttggaagcaaaaatctgttcatgagaaatagcttgtcaggaagatcggaggtgccaagtagcagagaaagcatcccccagctctgacagggagacagcacatgtctaaggcccacaagccttggccctaccggaggagaagtcaattttcttctcgaaaatacctgaaaaaagaaatgaattccttccagcaacagccaccgccattcggcacagtgccaccacaaatgatgtttcctccaaactggcagggggcagagaaggacgctgctttcctcgccaaggacttcaactttctcactttgaacaatcagccaccaccaggaaacaggagccaaccaagggcaatggggcccgagaacaacctgtacagccagtacgagcagaaggtgcgcccctgcattgacctcatcgactccctgcgggctctgggtgtggagcaggacctggccctgccagccatcgccgtcatcggggaccagagctcgggcaagagctctgtgctggaggcactgtcaggagtcgcgcttcccagaggcagcggaatcgtaaccaggtgtccgctggtgctgaaactgaaaaagcagccctgtgaggcatgggccggaaggatcagctaccggaacaccgagctagagcttcagagaccctggccaggtggagaaagagatacacaaagcccagaacgtcatggccgggaatggccggggcatcagccatgagctcatcagcctggagatcacctcccctgaggttccagacctgaccatcattgaccttcccggcatcaccagggtggctgtggacaaccagccccgagacatcggactgcagatcaaggctctcatcaagaagtacatccagaggcagcagacgatcaacttggtggtggttccctgtaacgtggacattgccaccacggaggcgctgagcatggcccatgaggtggacccggaaggggacaggaccatcggtatcctgaccaaaccagatctaatggacaggggcactgagaaaagcgtcatgaatgtggtgcggaacctcacgtaccccctcaagaagggctacatgattgtgaagtgccggggccagcaggagatcacaaacagggctgagcttggcagaggcaaccaagaaagaaattacattctttcaaacacatccatatttcagagttctcctggaggaggggtcagccacggttccccgactggcagaaagacttaccactgaactcatcatgcatatccaaaaatcgctcccgttgttagaaggacaaataagggagagccaccagaaggcgaccgaggagctgcggcgttgcggggctgacatccccagccaggaggccgacaagatgttctttctaattgagaaaatcaagatgtttaatcaggacatcgaaaagttagtagaaggagaagaagttgtaagggagaatgagacccgtttatacaacaaaatcagagaggattttaaaaactgggtaggcatacttgcaactaatacccaaaaagttaaaaatattatccacgaagaagttgaaaaatatgaaaagcagtatcgaggcaaggagcttctgggatttgtcaactacaagacatttgagatcatcgtgcatcagtacatccagcagctggtggagcccgcccttagcatgctccagaaagccatggaaattatccagcaagctttcattaacgtggccaaaaaacattttggcgaatttttcaaccttaaccaaactgttcagagcacgattgaagacataaaagtgaaacacacagcaaaggcagaaaacatgatccaacttcagttcagaatggagcagatggttttttgtcaagatcagatttacagtgttgttctgaagaaagtccgagaagagatttttaaccctctggggacgccttcacagaatatgaagttgaactctcattttcccagtaatgagtcttcggtttcctcctttactgaaataggcatccacctgaatgcctacttcttggaaaccagcaaacgtctcgccaaccagatcccatttataattcagtattttatgctccgagagaatggtgactccttgcagaaagccatgatgcagatactacaggaaaaaaatcgctattcctggctgcttcaagagcagagtgagaccgctaccaagagaagaatccttaaggagagaatttaccggctcactcaggcgcgacacgcactctgtcaattctccagcaaagagatccactgaagggcggcgatgcctgtggttgttttcttgtgcgtactcattcattctaaggggagtcggtgcaggatgccgcttctgctttggggccaaactcttctgtcactatcagtgtccatctctactgtactccctcagcatcagagcatgcatcaggggtccacacaggctcagctctctccaccacccagctcttccctgaccttcacgaagggatggctctccagtccttgggtcccgtagcacacagttacagtgtcctaagatactgctatcattcttcgctaatttgtatttgtattcccttccccctacaagattatgagaccccagagggggaaggtctgggtcaaattcttcttttgtatgtccagtctcctgcacagcacctgcagcattgtaactgcttaataaatgacatctcactgaacgaatgagtgctgtgtaagtgatggagatacctgaggctattgctcaagcccaggccttggacatttagtgactgttagccggtccctttcagatccagtggccatgccccctgcttcccatggttcactgtcattgtgtttcccagcctctccactcccccgccagaaaggagcctgagtgattctcttttcttcttgtttccctgattatgatgagcttccattgttctgttaagtcttgaagaggaatttaataaagcaaagaaactttttaaaaacgtaaaacacacacaaaacacagggcggccg

SEQ ID NO: 587 - DNA, 2951 bp, Homo sapiens
  misc_feature: Incyte ID No: 1924205CB1
tgaacgtgcagcgagcttgtcaggaagatcggaggtgccaagtagcagagaaagcatcccccagctctgacagggagacagcacatgtctaaggcccacaagccttggccctaccggaggagaagtcaattttcttctcgaaaatacctgaaaaaagaaatgaattccttccagcaacagccaccgccattcggcacagtgccaccacaaatgatgtttcctccaaactggcagggggcagagaaggacgctgctttcctcgccaaggacttcaactttctcactttgaacaatcagccaccaccaggaaacaggagccaaccaagggcaatggggcccgagaacaacctgtacagccagtacgagcagaaggtgcgcccctgcattgacctcatcgactccctgcgggctctgggtgtggagcaggacctggccctgccagccatcgccgtcatcggggaccagagctcgggcaagagctctgtgctggaggcactgtcaggagtcgcgcttcccagaggcagcggaatcgtaaccaggtgtccgctggtgctgaaactgaaaaagcagccctgtgaggcatgggccggaaggatcagctaccggaacaccgagctagagcttcaggaccctggccaggtggagaaagagatacacaaagcccagaacgtcatggccgggaatggccggggcatcagccatgagctcatcagcctggagatcacctcccctgaggttccagacctgaccatcattgaccttcccggcatcaccagggtggctgtggacaaccagccccgagacatcggactgcagatcaaggctctcatcaagaagtacatccagaggcagcagacgatcaacttggtggtggttccctgtaacgtggacattgccaccacggaggcgctgagcatggcccatgaggtggacccggaaggggacaggaccatcggtatcctgaccaaaccagatctaatggacaggggcactgagaaaagcgtcatgaatgtggtgcggaacctcacgtaccccctcaagaagggctacatgattgtgaagtgccggggccagcaggagatcacaaacaggctgagcttggcagaggcaaccaagaaagaaattacattctttcaaacacatccatatttcagagttctcctggaggaggggtcagccacggttccccgactggcagaaagacttaccactgaactcatcatgcatatccaaaaatcgctcccgttgttagaaggacaaataagggagagccaccagaaggcgaccgaggagctgcggcgttgcggggctgacatccccagccaggaggccgacaagatgttctttctaattgagaaaatcaagatgtttaatcaggacatcgaaaagttagtagaaggagaagaagttgtaagggagaatgagacccgtttatacagcaaaatcagagaggattttaaaaactgggtaggcatacttgcaactaatacccaaaaagttaaaaatattatccacgaagaagttgaaaaatatgaaaagcagtatcgaggcaaggagcttctgggatttgtcaactacaagacatttgagatcatcgtgcatcagtacatccagcagctggtggagcccgcccttagcatgctccagaaagccatggaaattatccagcaagctttcattaacgtggccaaaaaacattttggcgaatttttcaaccttaaccaaactgttcagagcacgattgaagacataaaagtgaaacacacagcaaaggcagaaaacatgatccaacttcagttcagaatggagcagatggttttttgtcaagatcagatttacagtgttgttctgaagaaagtccgagaagagatttttaaccctctggggacgccttcacagaatatgaagttgaactctcattttcccagtaatgagtcttcggtttcctcctttactgaaataggcatccacctgaatgcctacttcttggaaaccagcaaacgtctcgccaaccagatcccatttataattcagtattttatgctccgagagaatggtgactccttgcagaaagccatgatgcagatactacaggaaaaaaatcgctattcctggctgcttcaagagcagagtgagaccgctaccaagagaagaatccttaaggagagaatttaccggctcactcaggcgcgacacgcactctgtcaattctccagcaaagagatccactgaagggcggcgatgcctgtggttgttttcttgtgcgtactcattcattctaaggggagtcggtgcaggatgccgcttctgctttggggccaaactcttctgtcactatcagtgtccatctctactgtactccctcagcatcagagcatgcatcaggggtccacacaggctcagctctctccaccacccagctcttccctgaccttcacgaagggatggctctccagtccttgggtcccgtagcacacagttacagtgtcctaagatactgctatcattcttcgctaatttgtatttgtattcccttccccctacaagattatgagaccccagagggggaaggtctgggtcaaattcttcttttgtatgtccagtctcctgcacagcacctgcagcattgtaactgcttaataaatgacatctcactgaacgaatgagtgctgtgtaagtgatggagatacctgaggctattgctcaagcccaggccttggacatttagtgactgttagccggtccctttcagatccagtggccatgccccctgcttcccatggttcactgtcattgtgtttcccagcctctccactcccccgccagaaaggagcctgagtgattctcttttcttcttgtttccctgattatgatgagcttccattgttctgttaagtcttgaagaggaatttaataaagcaaagaaactttttaaaaacgtaaaaaaaaaa

SEQ ID NO: 588 - DNA, 3632 bp, Homo sapiens
  misc_feature: Incyte ID No: 2131135CB1
tcaacggccatgagtgatttaggtgacactatagaaagctatgacgtccatgaagcggaaggaagcttcggaatccggttcgagaatcgaatcaatgaaagcattaaggcacaaacaaaagtgagaaagaaggtcatgggtgttctggacatttatggctttgagattttcgaggacaacagctttgagcagttcattattaattattgtaacgaaaagctgcaacaaatcttcattgaacttactcttaaagaagagcaggaggagtatatacgggaggatatagaatggactcacattgactacttcaataatgctatcatttgtgacctaatagaaaataacacaaatggaatcctggccatgctggatgaagagtgcctcagacctggcacagtcactgatgagaccttcttagaaaagctgaaccaagtatgtgccacccaccagcattttgaaagcaggatgagcaagtgctctcggttcctcaatgacacgtctctgcctcacagctgcttcaggatccagcattatgctggaaaggtgctgtaccaggtggaaggattcgttgacaaaaacaatgaccttctctatcgagacctgtcccaagccatgtggaaggccagccatgccctcatcaagtctttgttccccgaaggagatcccgccaagatcaacctgaaaaggcctcctacagcaggctcacagttcaaggcatccgtggccactctgatgaaaaacctacagaccaagaacccaaactatattaggtgtatcaaaccgaatgataaaaaagcagcacacatcttcaacgaggctctagtgtgtcatcagatcaggtacctggggcttttggagaacgtccgagtgcggagggcaggctacgccttcaggcaggcctatgaaccttgcctagaaagatacaaaatgctttgtaaacaaacatggcctcattggaaaggaccagccaggtctggtgtggaggtcctatttaatgaattagaaattcccgtggaagaatactcctttggtagatcaaagatattcatccgaaacccaagaacattattcaaattagaagacctgaggaagcaacgcctggaggacttggccactctcattcagaagatatatcgggggtggaaatgccgcacacacttcctgctaatgaaaaaaagccaaattgtgattgccgcctggtacaggagatatgcgcaacaaaagaggtaccagcagacaaagagttccgccttagtaattcagtcttatatccggggttggaaggctcgaaaaattctgcgggaactgaagcatcaaaagcgctgtaaggaagcagtcacgaccattgctgcatattggcatgggacccaggtacgtagagaatacaggaaattcttcagagccaatgctggaaagaaaatctatgagtttacgcttcagagaattgtgcaaaaatacttcttggaaatgaaaaataagatgccttccttatctccaatagacaagaattggccctcaagaccttacttattcttggattctactcacaaggagctaaaaaggattttccacttgtggaggtgtaaaaaatacagggaccaattcacagaccagcagaaacttatttatgaagagaaactagaagccagtgaactcttcaaagacaagaaggctttatacccatctagtgttgggcaaccattccaaggggcttacctggaaatcaacaagaaccccaagtataagaaactcaaagatgccattgaagaaaagatcatcattgctgaagtcgtgaacaaaattaaccgtgctaatgggaagagtacatctcggattttcctcttaacaaacaataatctccttcttgctgaccaaaagtctggacaaatcaagtcagaggttccattggtggatgtgaccaaggtatcaatgagctcacaaaatgatggcttcttcgccgtccacctcaaagagggctcagaagcagctagtaaaggagactttctcttcagcagtgatcacctgattgaaatggccaccaagctctatcgcacaactctcagccaaaccaaacagaagctcaatattgagatttccgatgagttcctggtacagttcagacaggacaaagtatgtgtgaagtttattcagggaaaccagaaaaatgggagtgtcccaacatgtaaacgaaaaaacaaccgtctccttgaagttgctgtcccttaactggcgcctcctctctactttcatggacttgttcctttgtaatagtgcaatttggttttgttttatttggggttcattgtatgtttgggaatcaccaaaggcttttagagttctttggcaaaataaaaatatttgactaatcaatttttattattggaatagttttaacctttcaaatacatgttctgtcctggagcaggattgtagaaactaacagtgtctattttcatgtctgatgtgttcttcctttagtcatcatgttaggtctgtgtaccctaaatcagcatattactcataaatcattaattaatataagcataggaaatggtcttaaaagatactgcattcattcatcagatatttattccatgcctactctatgctaggcactgtgctagatggtatgaaaacttattaggaacctttttgtttttgagaccattgcattctggctggtttgtgctggtttaacgacatctaagaaggtttagaaatggtgagaccaaaacaataactgttaatgatggacagcattattaggaaccctgtagtatgatatttaacaatataggcttcaagaagggctggtcctaagagggggcagaaatgaatgaccaggttaaatccctctacatgtggtttctgtttgaaaaaaagaaaactgacatttgaacaggacttttaatttgtttaaaactctggtaattacttgtaacagtagaaaatagaagtcattcttattttagaaaaagtgacagaagcagtccagtaagattatatgtttctgtttctggtaaataccatatatgatcctcgaaatgataatatctccagaatattgttttcacccaaatttgagtagatattttaaacacctaacaaagtaaagggctaaaagccattcagatagcagtaaaacattctgtatgatgtgcaataaaacatccaagatcttttttgaaagttttatttataatatacatttttgtatgagaaaggtgattggtacagggtgcctattttagtcatggatcaaaatttgtgtaacttgcagggctttctttctttttcttcaaatttacaagggttcattttggaaactacattttaaactttggaatcaaattgtttcttatttgggaggataatgtatatacattggtattatgttaaataataaaattgttctaatttggtgccatttcctgaatcacaactgtatttttgtatctcaagctattttcatatgttatgtgtcaatgtatcatctctcagaaaggttttacaatccaaacattatatgttctctgtgtaactgaatttcacttatcttttataaaccagaaacattaattgaaaatattttctggggattttctcttgacttgtatttttaaaaattgctc

SEQ ID NO: 589 - DNA, 3427 bp, Homo sapiens
  misc_feature: Incyte ID No: 1440138CB1
gggtggaaactgcctggagccgtttctcgcgccgctgttggtcgtgccgctgcctcctcctcctccgccgccgccgccgccgccgccgccgccctctccggctcttcgctcggcccctctccgcctccatgtgccggatagcgggagcgctgcggaccctgctgccgctgctggcggccctgcttcaggcgtctgtagaggcttctggtgaaatcgcattatgcaagactggatttcctgaagatgtttacagtgcagtcttatcgaaggatgtgcatgaaggacagcctcttctcaatgtgaagtttagcaactgcaatggaaaaagaaaagtacaatatgagagcagtgagcctgcagattttaaggtggatgaagatggcatggtgtatgccgtgagaagctttccactctcttctgagcatgccaagttcctgatatatgcccaagacaaagagacccaggaaaagtggcaagtggcagtaaaattgagcctgaagccaaccttaactgaggagtcagtgaaggagtcagcagaagttgaagaaatagtgttcccaagacaattcagtaagcacagtggccacctacaaaggcagaagagagactgggtcatccctccaatcaacttgccagaaaactccaggggaccttttcctcaagagcttgtcaggatcaggtctgatagagataaaaacctttcactgcggtacagtgtaactgggccaggagctgaccagcctccaactggtatcttcattatcaaccccatctcgggtcagctgtcggtgacaaagcccctggatcgcgagcagatagcccggtttcatttgagggcacatgcagtagatattaatggaaatcaagtggagaaccccattgacattgtcatcaatgttattgacatgaatgacaacagacctgagttcttacaccaggtttggaatgggacagttcctgagggatcaaagcctggaacatatgtgatgaccgtaacagcaattgatgctgacgatcccaatgccctcaatgggatgttgaggtacagaatcgtgtctcaggctccaagcaccccttcacccaacatgtttacaatcaacaatgagactggtgacatcatcacagtggcagctggacttgatcgagaaaaagtgcaacagtatacgttaataattcaagctacagacatggaaggcaatcccacatatggcctttcaaacacagccacggccgtcatcacagtgacagatgtcaatgacaatcctccagagtttactgccatgacgttttatggtgaagttcctgagaacagggtagacatcatagtagctaatctaactgtgaccgataaggatcaaccccatacaccagcctggaacgcagtgtacagaatcagtggcggagatcctactggacggttcgccatccagaccgacccaaacagcaacgacgggttagtcaccgtggtcaaaccaatcgactttgaaacaaataggatgtttgtccttactgttgctgcagaaaatcaagtgccattagccaagggaattcagcacccgcctcagtcaactgcaaccgtgtctgttacagttattgacgtaaatgaaaacccttattttgcccccaatcctaagatcattcgccaagaagaagggcttcatgccggtaccatgttgacaacattcactgctcaggacccagatcgatatatgcagcaaaatattagatacactaaattatctgatcctgccaattggctaaaaatagatcctgtgaatggacaaataactacaattgctgttttggaccgagaatcaccaaatgtgaaaaacaatatatataatgctactttccttgcttctgacaatggaattcctcctatgagtggaacaggaacgctgcagatctatttacttgatattaatgacaatgcccctcaagtgttacctcaagaggcagagacttgcgaaactccagaccccaattcaattaatattacagcacttgattatgacattgatccaaatgctggaccatttgcttttgatcttcctttatctccagtgactattaagagaaattggaccatcactcggcttaatggtgattttgctcagcttaatttaaagataaaatttcttgaagctggtatctatgaagttcccatcataatcacagattcgggtaatcctcccaaatcaaatatttccatcctgcgcgtgaaggtttgccagtgtgactccaacggggactgcacagatgtggacaggattgtgggtgcggggcttggcaccggtgccatcattgccatcctgctctgcatcatcatcctgcttatccttgtgctgatgtttgtggtatggatgaaacgccgggataaagaacgccaggccaaacaacttttaattgatccagaagatgatgtaagagataatattttaaaatatgatgaagaaggtggaggagaagaagaccaggactatgacttgagccagctgcagcagcctgacactgtggagcctgatgccatcaagcctgtgggaatccgacgaatggatgaaagacccatccacgccgagccccagtatccggtccgatctgcagccccacaccctggagacattggggacttcattaatgagggccttaaagcggctgacaatgaccccacagctccaccatatgactccctgttagtgtttgactatgaaggcagtggctccactgctgggtccttgagctcccttaattcctcaagtagtggtggtgagcaggactatgattacctgaacgactgggggccacggttcaagaaacttgctgacatgtatggtggaggtgatgactgaacttcagggtgaacttggtttttggacaagtacaaacaatttcaactgatattcccaaaaagcattcagaagctaggctttaactttgtagtctactagcacagtgcttgctggaggctttggcataggctgcaaaccaatttgggctcagagggaatatcagtgatccatactgtttggaaaaacactgagctcagttacacttgaattttacagtacagaagcactgggattttatgtgcctttttgtacctttttcagattggaattagttttctgtttaaggctttaatggtactgatttctgaaacgataagtaaaagacaaaatattttgtggtgggagcagtaagttaaaccatgatatgcttcaacacgcttttgttacattgcatttgcttttattaaaatacaaaattaaacaaacaaaaaaactcatggagcgattttattatcttgggggatgagaccatgagattggaaaatgtacattacttctagttttagactttagtgtgttttttttttttcactagaatcttaaaacttactcagctggttgcaataaaggggttttcc

SEQ ID NO: 590 - DNA, 2987 bp, Homo sapiens
  misc_feature: Incyte ID No: 411208.3
ggagccctgggcgcgggggcggcgtgtcaggtggttgcggagctggtaagaatcatattctaagaactcagccactcaggtatccaccatggtgctgggtcctgaacagaagatgtcagatgacagtgtttctggagatcatggggagtctgccagtcttggtaacatcaaccctgcctatagtaatccctctctttcacagtcccctggggactcagaggagtacttcgccacttactttaatgagaagatctccattcctgaggaggagtactcttgttttagctttcgtaaactctgggctttcaccggaccaggttttcttatgagcattgcctacctggatccaggaaatattgaatccgatttgcagtctggagcagtggctggatttaagttgctctggatccttctgttggccacccttgtggggctgctgctccagcggcttgcagctagactgggagtggttactgggctgcatcttgctgaagtatgtcaccgtcagtatcccaaggtcccacgagtcatcctgtggctgatggtggagttggctatcatcggctcagacatgcaagaagtcattggctcagccattgctatcaatcttctgtctgtaggaagaattcctctgtggggtggcgttctcatcaccattgcagatacttttgtatttctcttcttggacaaatatggcttgcggaagctagaagcattttttggctttctcatcactattatggccctcacatttggatatgagtatgttacagtgaaacccagccagagccaggtactcaagggcatgttcgtaccatcctgttcaggctgtcgcactccacagattgaacaggctgtgggcatcgtgggagctgtcatcatgccacacaacatgtacctgcattctgccttagtcaagtctagacaggtaaaccggaacaataagcaggaagttcgagaagccaataagtactttttcattgaatcctgcattgcactctttgtttccttcatcatcaatgtctttgttgtctcagtctttgctgaagcattttttgggaaaaccaacgagcaggtggttgaagtctgtacaaataccagcagtcctcatgctggcctctttcctaaagataactcgacactggctgtggacatctacaaagggggtgttgtgctgggatgttactttgggcctgctgcactctacatttgggcagtggggatcctggctgcaggacagagctccaccatgacaggaacctattctggccagtttgtcatggagggattcctgaacctaaagtggtcacgctttgcccgagtggttctgactcgctctattgccatcatccccactctgcttgttgctgtcttccaagatgtagagcatctaacagggatgaatgactttctgaatgttctacagagcttacagcttccctttgctctcatacccatcctcacatttacgagcttgcggccagtaatgagtgactttgccaatggactaggctggcggattgcaggaggaatcttggtccttatcatctgttccatcaatatgtactttgtagtggtttatgtccgggacctagggcatgtggcattatatgtggtggctgctgtggtcagcgtggcttatctgggctttgtgttctacttgggttggcaatgtttgattgcactgggcatgtccttcctggactgtgggcatacgtgccatctgggattgacagctcagcctgaactctatcttctgaacaccatggacgctgactcacttgtgtctagatgactgacagcctgagagactctataagaacatgtttttctaagccctttttgtgccaggtgtcccgttaacgtctctgttagttcagaggtgagttttgttcagacgttttgaacaaaaggcaaagatttcctcatgggaagggtgttcaaaactgacagctataaatgtaggtcagagacccacccacctcataacagtcatacactcccagagttaaacgattggcctctgatggccacacacccctatgggcttgtgtcttggactctgggatttaaaagatatatatgtatatatatttatgtaaacctgagcatctcagtttgggtagagttttaaggttatatgaaactgatagaacttttgtattttttttttaaatattgttttgatatatcagatatttgttttgtctggatcacaagtgagaaagaaaagagaataatgctctttttcacaatgaactggtcaaattgactatcttgtaaagtgatactttactatgtcagtgaaatttcagtttgattttagtcaaccagattatatcctttgtatctactgatattaacacatcatattaacacatcatttcttaaaaaaacatttcttctgtttggcaatcataattaactctggttatcagcctattttgtaattattgtctttgtcgtcacttttcttgaattgttttctagtcattaaacagatatgaaggcattgccaaagagctttaatatccagtaacaagatccagaaaccaaactttaaccagtgatcagttttccgtgctgcattgtaactcagctcattctggcattcaagttttaggcaaaaaaagaggaaacttctaacatttagcttgtaagtcctgacataagatagtgaagatatttatcttctttctaatatttgtatagtccgccaatgtattttcttcccactattcccattaacataccaaacactgtttctaggtccaaagtctatttctaggagtggccaatatttgtattgttgaatctcctagggaatgctaaatgtttcactttaaaatacctatttataccaagtagcatgagattagtactagagtgagatttggaatattagtccacatatcacaaactgcttgcctacatgtatagatttttttttcacccaccttcctaaccaggaatttgtttccttaaat

SEQ ID NO: 591 - DNA, 4071 bp, Homo sapiens
  misc_feature: Incyte ID No: 358933.9
  unsure 3867-3869, 3875: a, t, c, g, or other
agtgtgctggaaacggcacagtagccggggcaggaagaggaggtttcgccaccggagcggccggcgacgcgctgacagcttcccctgcccttcccgtcggtcgggccgccagccgccgcagccctcggcctgcacgcagccaccggccccgctcccggagcccagcgccgccgaggccgcagccgcccggccagtaaggcggcgccgccgcccggccaccgcgcgccctgcgcttccctccgcccgcgctgcggccatggcgcggcgctgactggcctggcccggccccgccgcgctcccgctcgccccgacccgcactcgggcccgcccgggctccggcctgccgccgcctcttccttctccagccggcaggcccgcgccgcttaggagggagagcccacccgcgccaggaggccgaacgcggactcgccacccggcttcagaatggcagaagatgatccatatttgggaaggcctgaacaaatgtttcatttggatccttctttgactcatacaatatttaatccagaagtatttcaaccacagatggcactgccaacagcagatggcccataccttcaaatattagagcaacctaaacagagaggatttcgtttccgttatgtatgtgaaggcccatcccatggtggactacctggtgcctctagtgaaaagaacaagaagtcttaccctcaggtcaaaatctgcaactatgtgggaccagcaaaggttattgttcagttggtcacaaatggaaaaaatatccacctgcatgcccacagcctggtgggaaaacactgtgaggatgggatctgcactgtaactgctggacccaaggacatggtggtcggcttcgcaaacctgggtatacttcatgtgacaaagaaaaaagtatttgaaacactggaagcacgaatgacagaggcgtgtataaggggctataatcctggactcttggtgcaccctgaccttgcctatttgcaagcagaaggtggaggggaccggcagctgggagatcgggaaaaagagctaatccgccaagcagctctgcagcagaccaaggagatggacctcagcgtggtgcggctcatgtttacagcttttcttccggatagcactggcagcttcacaaggcgcctggaacccgtggtatcagacgccatctatgacagtaaagcccccaatgcatccaacttgaaaattgtaagaatggacaggacagctggatgtgtgactggaggggaggaaatttatcttctttgtgacaaagttcagaaagatgacatccagattcgattttatgaagaggaagaaaatggtggagtctgggaaggatttggagatttttcccccacagatgttcatagacaatttgccattgtcttcaaaactccaaagtataaagatattaatattacaaaaccagcctctgtgtttgtccagcttcggaggaaatctgacttggaaactagtgaaccaaaacctttcctctactatcctgaaatcaaagataaagaagaagtgcagaggaaacgtcagaagctcatgcccaatttttcggatagtttcggcggtggtagtggtgccggagctggaggcggaggcatgtttggtagtggcggtggaggagggggcactggaagtacaggtccagggtatagcttcccacactatggatttcctacttatggtgggattactttccatcctggaactactaaatctaatgctgggatgaagcatggaaccatggacactgaatctaaaaaggaccctgaaggttgtgacaaaagtgatgacaaaaacactgtaaacctctttgggaaagttattgaaaccacagagcaagatcaggagcccagcgaggccaccgttgggaatggtgaggtcactctaacgtatgcaacaggaacaaaagaagagagtgctggagttcaggataacctctttctagagaagcgctatgcagcttgcaaagaggcatgccaatgcccttttcgactacgcggtgacaggagacgtgaagatgctgctggccgtccagcgccatctcactgctgtgcaggatgagaatggggacagtgtcttacacttagcaatcatccaccttcattctcaacttgtgagggatctactagaagtcacatctggtttgatttctgatgacattatcaacatgagaaatgatctgtaccagacgcccttgcacttggcagtgatcactaagcaggaagatgtggtggaggatttgctgagggctggggccgacctgagccttctggaccgcttgggtaactctgttttgcacctagctgccaaagaaggacatgataaagttctcagtatcttactcaagcacaaaaaggcagcactacttcttgaccaccccaacggggacggtctgaatgccattcatctagccatgatgagcaatagcctgccatgtttgctgctgctggtggccgctggggctgacgtcaatgctcaggagcagaagtccgggcgcacagcactgcacctggctgtggagcacgacaacatctcattggcaggctgcctgctcctggagggtgatgcccatgtggacagtactacctacgatggaaccacacccctgcatatagcagctgggagagggtccaccaggctggcagctcttctcaaagcagcaggagcagatcccctggtggagaactttgagcctctctatgacctggatgactcttgggaaaatgcaggagaggatgaaggagttgtgcctggaaccacgcctctagatatggccaccagctggcaggtatttgacatattaaatgggaaaccatatgagccagagtttacatctgatgatttactagcacaaggagacatgaaacagctggctgaagatgtgaagctgcagctgtataagttactagaaattcctgatccagacaaaaactgggctactctggcgcagaaattaggtctggggatacttaataatgccttccggctgagtcctgctccttccaaaacacttatggacaactatgaggtctctgggggtacagtcagagagctggtggaggccctgagacaaatgggctacaccgaagcaattgaagtgatccaggcagcctccagcccagtgaagaccacctctcaggcccactcgctgcctctctcgcctgcctccacaaggcagcaaatagacgagctccgagacagtgacagtgtctgcgacagcggcgtggagacatccttccgcaaactcagctttaccgagtctctgaccagtggtgcctcactgctaactctcaacaaaatgccccatgattatgggcaggaaggacctctagaaggcaaaatttagcctgctgacaatttcccacaccgtgtaaaccaaagccctaaaattccactgcgttgtccacaagacagaagctgaagtgcatccaaaggtgctcagagagccggcccgcctgaatcattctcgatttaactcgagaccttttcaacttggcttcctttcttggttcataaatgaattttagtttggttcacttacagatagtatctagcaatcacaacactggctgagcggatgcatctggggatgaggttgcttactaagctttgccagctgctgctggatcacagctgctttctgttgtcattgctgttgtccctctgctacgttcctattgtcattaaaggtatcacggtcgccacctggcattccttctgaccacagcatcattttgcattcaaattaagggttaagaaaagagatattttaaaatgagagtcacttgatgtgccattttaaaaaaaaaggcatattgctttttctaatgtggttatttctctgatttgcaaaaaaannnaaaaanaaaaaaaatacttgtcaatatttaaacatggttacaatcattgctgaaaatggtattttcccccttttctgcattttgctattgtaaatatgttttttagatcaaatactttaaaggaaaaaatgttggatttataaatgctattttttattttacttttataataaaaggaaaagcaaattgatgacctcaaaaa

SEQ ID NO: 592 - DNA, 3006 bp, Homo sapiens
  misc_feature: Incyte ID No: 1683849CB1
caagcccaactccggatctcgctctccaccggatctcacccgccacacccggacaggcggctggaggaggcgggcgtctaaaattctgggaagcagaacctggccggagccactagacagagccgggcctagcccagagacatggagagttgctacaacccaggtctggatggtattattgaatatgatgatttcaaattgaactcctccattgtggaacccaaggagccagccccagaaacagctgatggcccctacctggtgatcgtggaacagcctaagcagagaggcttccgatttcgatatggctgtgaaggcccctcccatggaggactgcccggtgcctccagtgagaagggccgaaagacctatcccactgtcaagatctgtaactacgagggaccagccaagatcgaggtggacctggtaacacacagtgacccacctcgtgctcatgcccacagtctggtgggcaagcaatgctcggagctggggatctgcgccgtttctgtggggcccaaggacatgactgcccaatttaacaacctgggtgtcctgcatgtgactaagaagaacatgatggggactatgatacaaaaacttcagaggcagcggctccgctctaggccccagggccttacggaggccgagcagcgggagctggagcaagaggccaaagaactgaagaaggtgatggatctgagtatagtgcggctgcgcttctctgccttccttagagccagtgatggctccctctccctgcccctgaagccagtcatctcccagcccatccatgacagcaaatctccgggggcatcaaacctgaagatttctcgaatggacaagacagcaggctctgtgcggggtggagatgaagtttatctgctttgtgacaaggtgcagaaagatgacattgaggttcggttctatgaggatgatgagaatggatggcaggcctttggggacttctctcccacagatgtgcataaacagtatgccattgtgttccggacacccccctatcacaagatgaagattgagcggcctgtaacagtgtttctgcaactgaaacgcaagcgaggaggggacgtgtctgattccaaacagttcacctattaccctctggtggaagacaaggaagaggtgcagcggaagcggaggaaggccttgcccaccttctcccagcccttcgggggtggctcccacatgggtggaggctctgggggtgcagccgggggctacggaggagctggaggaggtggcagcctcggtttcttcccctcctccctggcctacagcccctaccagtccggcgcgggccccatgggctgctacccgggaggcgggggcggggcgcagatggccgccacggtgcccagcagggactccggggaggaagccgcggagccgagcgccccctccaggaccccccagtgcgacgcgcaggccccggagatgctgcagcgagctcgagagtacaacgcgcgcctgttcggcctggcgcagcgcagcgcccgagccctactcgactacggcgtcaccgcggacgcgcgcgcgctgctggcgggacagcgccacctgctgacggcgcaggacgagaacggagacacaccactgcacctagccatcatccacgggcagaccagtgtcattgagcagatagtctatgtcatccaccacgcccaggacctcggcgttgtcaacctcaccaaccacctgcaccagacgcccctgcacctggcggtgatcacggggcagacgagtgtggtgagctttctgctgcgggtaggtgcagacccagctctgctggatcggcatggagactcagccatgcatctggcgctgcgggcaggcgctggtgctcctgagctgctgcgtgcactgcttcagagtggagctcctgctgtgccccagctgttgcatatgcctgactttgagggactgtatccagtacacctggcggtccgagcccgaagccctgagtgcctggatctgctggtggacagtggggctgaagtggaggccacagagcggcaggggggacgaacagccttgcatctagccacagagatggaggagctggggttggtcacccatctggtcaccaagctccgggccaacgtgaacgctcgcacctttgcgggaaacacacccctgcacctggcagctggactggggtacccgaccctcacccgcctccttctgaaggctggtgctgacatccatgctgaaaacgaggagcccctgtgcccactgccttcaccccctacctctgatagcgactcggactctgaagggcctgagaaggacacccgaagcagcttccggggccacacgcctcttgacctcacttgcagcaccaaggtgaagaccttgctgctaaatgctgctcagaacaccatggagccacccctgaccccgcccagcccagcagggccgggactgtcacttggtgatacagctctgcagaacctggagcagctgctagacgggccagaagcccagggcagctgggcagagctggcagagcgtctggggctgcgcagcctggtagacacgtaccgacagacaacctcacccagtggcagcctcctgcgcagctacgagctggctggcggggacctggcaggtctactggaggccctgtctgacatgggcctagaggagggagtgaggctgctgaggggtccagaaacccgagacaagctgcccagcacagcagaggtgaaggaagacagtgcgtacgggagccagtcagtggagcaggaggcagagaagctgggcccaccccctgagccaccaggagggctctgccacgggcacccccagcctcaggtgcactgacctgctgcctgcccccagcccccttcccggaccccctgtacagcgtccccacctatttcaaatcttatttaacaccccacacccacccctcagttgggacaaataaaggattctcatgggaaggggaggacccctccttcccaacttaaaaaaaaaaaaaaa

SEQ ID NO: 593 - DNA, 990 bp, Homo sapiens
  misc_feature: Incyte ID No: 4407612CB1
ggtgactgtctcagtggagctgggtcatctcagcaggccttggctccttgaacttttggccgccatgtgcttcccgaaggtcctctctgatgacatgaagaagctgaaggcccgaatggtaatgctcctccctacttctgctcaggggttgggggcctgggtctcagcgtgtgacactgaggacactgtgggacacctgggaccctggagggacaaggatccggccctttggtgccaactctgcctctcttcacagcaccaggccatagaaagattttatgataaaatgcaaaatgcagaatcaggacgtggacaggtgatgtcgagcctggcagagctggaggacgacttcaaagagggctacctggagacagtggcggcttattatgaggagcagcacccagagctcactcctctacttgaaaaagaaagagatggattacggtgccgaggcaacagatcccctgtcccggatgttgaggatcccgcaaccgaggagcctggggagagcttttgtgacaaggtcatgagatggttccaggccatgctgcagcggctgcagacctggtggcacggggttctggcctgggtgaaggagaaggtggtggccctggtccatgcagtgcaggccctctggaaacagttccagagtttctgctgctctctgtcagagctcttcatgtcctctttccagtcctacggagccccacggggggacaaggaggagctgacaccccagaagtgctctgaaccccaatcctcaaaatgaagatactgacaccacctttgccctccccgtcaccgcgcacccaccctgacccctccctcagctgtcctgtgccccgccctctcccgcacactcagtccccctgcctggcgttcctgccgcagctctgacctggtgctgtcgccctggcatcttaataaaacctgcttatacttccctggcaggggagataccatgaaaaaaaaaagaaaaaaaactcgagg

SEQ ID NO: 594 - DNA, 1768 bp, Homo sapiens
  misc_feature: Incyte ID No: 386116CB1
cacggacaccgtgcgtaccggcctgcggcgcccggccaccggggcggaccgcggaacccgaggccatgtcccatgaaaagagttttttggtgtctggggacaactatcctgcccccaaccctggatatccgggggggccccagccacccatgcccccctatgctcagcctccctaccctggggccccttacccacagccccctttccagccctccccctacggtcagccagggtacccccatggccccagcccctacccccaagggggctacccacagggtccctacccccaagggggctacccacagggcccctacccacaagagggctacccacagggcccctacccccaagggggctacccccaggggccatatccccagagaccccttcccccccaacccctatggacagccacaggtcttcccaggacaagaccctgactcaccccagcatggaaactaccaggaggagggtcccccatcctactatgacaaccaggacttccctgccaccaactgggatgacaagagcatccgacaggccttcatccgcaaggtgttcctagtgctgaccttgcagctgtcggtgaccctgtccacggtgtctgtgttcacttttgttgcggaggtgaagggctttgtccgggagaatgtctggacctactatgtctcctatgctgtcttcttcatctctctcatcgtcctcagctgttgtggggacttccggcgaaagcacccctggaaccttgttgcactgtcggtcctgaccgccagcctgtcgtacatggtggggatgatcgccagcttctacaacaccgaggcagtcatcatggccgtgggcatcaccacagccgtctgcttcaccgtcgtcatcttctccatgcagacccgctacgacttcacctcatgcatgggcgtgctcctggtgagcatggtggtgctcttcatcttcgccattctctgcatcttcatccggaaccgcatcctggagatcgtgtacgcctcactgggcgctctgctcttcacctgcttcctcgcagtggacacccagctgctgctggggaacaagcagctgtccctgagcccagaagagtatgtgtttgctgcgctgaacctgtacacagacatcatcaacatcttcctgtacatcctcaccatcattggccgcgccaaggagtagccgagctccagctcgctgtgcccgctcaggtggcacggctggcctggaccctgcccctggcacggcagtgccagctgtacttcccctctctcttgtccccaggcacagcctagggaaaaggatgcctctctccaaccctcctgtatgtacactgcagatacttccatttggacccgctgtggccacagcatggcccctttagtcctcccgcccccgccaaggggcaccaaggccacgtttccgtgccacctcctgtctactcattgttgcatgagccctgtctgccagcccaccccagggactgggggcagcaccaggtcccggggagagggattgagccaagaggtgagggtgcacgtcttccctcctgtcccagctccccagcctggcgtagagcacccctcccctcccccccacccccctggagtgctgccctctggggacatgcggagtggggttcttatccctgtgctgagccctgagggcagagaggatggcatgtttcaggggagggggaagccttcctctcaatttgttgtcagtgaaattccaataaatgggatttgctctctgcaaaaaaaaaaaa

SEQ ID NO: 595 - DNA, 2082 bp, Homo sapiens
  misc_feature: Incyte ID No: 131850CB1
gcttggcgctggctcccggaatatggagccctgggcgcgggggcggcgtgtcaggtggttgcggagctggtaagaatcatattctaagaactcagccactcaggtatccaccatggtgctgggtcctgaacagaagatgtcagatgacagtgtttctggagatcatggggagtctgccagtcttggtaacatcaaccctgcctatagtaatccctctctttcacagtcccctggggactcagaggagtacttcgccacttactttaatgagaagatctccattcctgaggaggagtactcttgttttagctttcgtaaactctgggctttcaccggaccaggttttcttatgagcattgcctacctggatccaggaaatattgaatccgatttgcagtctggagcagtggctggatttaagttgctctggatccttctgttggccacccttgtggggctgctgctccagcggcttgcagctagactgggagtggttactgggctgcatcttgctgaagtatgtcaccgtcagtatcccaaggtcccacgagtcatcctgtggctgatggtggagttggctatcatcggctcagacatgcaagaagtcattggctcagccattgctatcaatcttctgtctgtaggaagaattcctctgtggggtggcgttctcatcaccattgcagatacttttgtatttctcttcttggacaaatatggcttgcggaagctagaagcattttttggctttctcatcactattatggccctcacatttggatatgagtatgttacagtgaaacccagccagagccaggtactcaagggcatgttcgtaccatcctgttcaggctgtcgcactccacagattgaacaggctgtgggcatcgtgggagctgtcatcatgccacacaacatgtacctgcattctgccttagtcaagtctagacaggtaaaccggaacaataagcaggaagttcgagaagccaataagtactttttcattgaatcctgcattgcactctttgtttccttcatcatcaatgtctttgttgtctcagtctttgctgaagcattttttgggaaaaccaacgagcaggtggttgaagtctgtacaaataccagcagtcctcatgctggcctctttcctaaagataactcgacactggctgtggacatctacaaagggggtgttgtgctgggatgttactttgggcctgctgcactctacatttgggcagtggggatcctggctgcaggacagagctccaccatgacaggaacctattctggccagtttgtcatggagggattcctgaacctaaagtggtcacgctttgcccgagtggttctgactcgctctattgccatcatccccactctgcttgttgctgtcttccaagatgtagagcatctaacagggatgaatgactttctgaatgttctacagagcttacagcttccctttgctctcatacccatcctcacatttacgagcttgcggccagtaatgagtgactttgccaatggactaggctggcggattgcaggaggaatcttggtccttatcatctgttccatcaatatgtactttgtagtggtttatgtccgggacctagggcatgtggcattatatgtggtggctgctgtggtcagcgtggcttatctgggctttgtgttctacttgggttggcaatgtttgattgcactgggcatgtccttcctggactgtgggcatacggtaagcatctctaaaggcctgctgacagaagaagccacccgtggctacgttaaataacactggattagtctgtcttctgcaggtagccatcagagccagtgtgtttctatggtttactgtgtgaacatagccaaaagtatgtgccgttgcacagactgtgtttatgactcaaccgttggttggaaaagactttgtttcatgtgtatttgaaagatggaattattttttccttcctgacctaaccttagaactggattagggtgggatctttgaaaagctgacatttgctgctatcattccaacactaaattcttaagtagttgcccaggggccagctcatt

SEQ ID NO: 596 - DNA, 1956 bp, Homo sapiens
  misc_feature: Incyte ID No: 1238747CB1
cttcctgttttgcctgctagcatctccctgtaactctcccaatcttgaggagtgatccctgtcccagcccctggaaaggggcaggaacgacaaactcaaagtccaggatgttcaccatgacaagagccatggaagaggctctttttcagcacttcatgcaccagaagctggggatcgcctatgccatacacaagccatttcccttctttgaaggcctcctagacaactccatcatcactaagagaatgtacatggaatctctggaagcctgtagaaatttgatccctgtatccagagtggtgcacaacattctcacccaactggagaggacttttaacctgtctcttctggtgacattgttcagtcaaattaacctgcgtgaatatcccaatctggtgacgatttacagaagcttcaaacgtgttggtgcttcctatgaacggcagagcagagacacaccaatcctacttgaagccccaactggcctagcagaaggaagctccctccataccccactggcgctgcccccaccacaaccccctcaaccaagctgttcaccctgtgcgccaagagtcagtgagcctggaacatcctcccagcaaagcgatgagatcctgagtgagtcgcccagcccatctgaccctgtcctgcctctccctgcactcatccaggaaggaagaagcacttcagtgaccaatgacaagttaacatccaaaatgaatgcggaagaagactcagaagagatgcccagcctcctcactagcactgtgcaagtggccagtgacaacctgatcccccaaataagagataaagaagaccctcaagagatgccccactctcccttgggctctatgccagagataagagataattctccagaaccaaatgacccagaagagccccaggaggtgtccagcacaccttcagacaagaaaggaaagaaaagaaaaagatgtatctggtcaactccaaaaaggagacataagaaaaaaagcctcccaagagggacagcctcatctagacacggaatccaaaagaagctcaaaagggtggatcaggttcctcaaaagaaagatgactcaacttgtaactccacggtagagacaagggcccaaaaggcgagaactgaatgtgcccgaaagtcgagatcagaggagatcattgatggcacttcagaaatgaatgaaggaaagaggtcccagaagacgcctagtacaccacgaagggtcacacaaggggcagcctcacctgggcatggcatccaagagaagctccaagtggtggataaggtgactcaaaggaaagacgactcaacctggaactcagaggtcatgatgagggtccaaaaggcaagaactaaatgtgcccgaaagtccagatcgaaagaaaagaaaaaggagaaagatatctgttcaagctcaaaaaggagatttcagaaaaatattcaccgaagaggaaaacccaaaagtgacactgtggattttcactgttctaagctccccgtgacctgtggtgaggcgaaagggattttatataagaagaaaatgaaacacggatcctcagtgaagtgcattcggaatgaggatggaacttggttaacaccaaatgaatttgaagtcgaaggaaaaggaaggaacgcaaagaactggaaacggaatatacgttgtgaaggaatgaccctaggagagctgctgaagagtggacttttgctctgtcctccaagaataaatctcaagagagagttaaatagcaagtgaatttctactaccctctcagtcaccatgttgcagactttccctgtctggaggctcaccttagagcttctgagtttccaagctctgagtcacctccacatttgggcatggcatcttcaaaacaattaatttgcatagttaatttgggatggggaagcaaatgactctaaaataaaaattaaatgaaaaagcaaaaaaaaaa

SEQ ID NO: 597 - DNA, 3403 bp, Homo sapiens
  misc_feature: Incyte ID No: 1258943CB1
gaagaagctaactggggacgtgggcagccctgacgtgatgagctcaaccagcagagacattccatcccaagagaggtctgcgtgacgcgtccgggaggccaccctcagcaagaccaccgtacagttggtggaaggggtgacagctgcattctcctgtgcctaccacgtaaccaaaaatgaaggagaactactgtttacaagccgccctggtgtgcctgggcatgctgtgccacagccatgcctttgccccagagcggcgggggcacctgcggccctccttccatgggcaccatgagaagggcaaggaggggcaggtgctacagcgctccaagcgtggctgggtctggaaccagttcttcgtgatagaggagtacaccgggcctgaccccgtgcttgtgggcaggcttcattcagatattgactctggtgatgggaacattaaatacattctctcaggggaaggagctggaaccatttttgtgattgatgacaaatcagggaacattcatgccaccaagacgttggatcgagaagagagagcccagtacacgttgatggctcaggcggtggacagggacaccaatcggccactggagccaccgtcggaattcattgtcaaggtccaggacattaatgacaaccctccggagttcctgcacgagacctatcatgccaacgtgcctgagaggtccaatgtgggaacgtcagtaatccaggtgacagcttcagatgcagatgaccccacttatggaaatagcgccaagttagtgtacagtatcctcgaaggacaaccctatttttcggtggaagcacagacaggtatcatcagaacagccctacccaacatggacagggaggccaaggaggagtaccacgtggtgatccaggccaaggacatgggtggacatatgggcggactctcagggacaaccaaagtgacgatcacactgaccgatgtcaatgacaacccaccaaagtttccgcagagcgtataccagatgtctgtgtcagaagcagccgtccctggggaggaagtaggaagagtgaaagctaaagatccagacattggagaaaatggcttagtcacatacaatattgttgatggagatggtatggaatcgtttgaaatcacaacggactatgaaacacaggagggggtgataaagctgaaaaagcctgtagattttgaaaccaaaagagcctatagcttgaaggtagaggcagccaacgtgcacatcgacccgaagtttatcagcaatggccctttcaaggacactgtgaccgtcaagatcgcagtagaagatgctgatgagccccctatgttcttggccccaagttacatccacgaagtccaagaaaatgcagctgctggcaccgtggttgggagagtgcatgccaaagaccctgatgctgccaacagcccgataaggtattccatcgatcgtcacactgacctcgacagatttttcactattaatccagaggatggttttattaaaactacaaaacctctggatagagaggaaacagcctggctcaacatcactgtctttgcagcagaaatccacaatcggcatcaggaagccaaagtcccagtggccattagggtccttgatgtcaacgataatgctcccaagtttgctgccccttatgaaggtttcatctgtgagagtgatcagaccaagccactttccaaccagccaattgttacaattagtgcagatgacaaggatgacacggccaatggaccaagatttatcttcagcctaccccctgaaatcattcacaatccaaatttcacagtcagagacaaccgagataacacagcaggcgtgtacgcccggcgtggagggttcagtcggcagaagcaggacttgtaccttctgcccatagtgatcagcgatggcggcatcccgcccatgagtagcaccaacaccctcaccatcaaagtctgcgggtgcgacgtgaacggggcactgctctcctgcaacgcagaggcctacattctgaacgccggcctgagcacaggcgccctgatcgccatcctcgcctgcatcgtcattctcctggtcattgtagtattgtttgtgaccctgagaaggcaaaagaaagaaccactcattgtctttgaggaagaagatgtccgtgagaacatcattacttatgatgatgaagggggtggggaagaagacacagaagcctttgatattgccaccctccagaatcctgatggtatcaatggatttatcccccgcaaagacatcaaacctgagtatcagtacatgcctagacctgggctccggccagcgcccaacagcgtggatgtcgatgacttcatcaacacgagaatacaggaggcagacaatgaccccacggctcctccttatgactccattcaaatctacggttatgaaggcaggggctcagtggccgggtccctgagctccctagagtcggccaccacagattcagacttggactatgattatctacagaactggggacctcgttttaagaaactagcagatttgtatggttccaaagacacttttgatgacgattcttaacaataacgatacaaatttggccttaagaactgtgtctggcgttctcaagaatctagaagatgtgtaaacaggtatttttttaaatcaaggaaaggctcatttaaaacaggcaaagttttacagagaggatacatttaataaaactgcgaggacatcaaagtggtaaatactgtgaaataccttttctcacaaaaaggcaaatattgaagttgtttatcaacttcgctagaaaaaaaaaacacttggcatacaaaatatttaagtgaaggagaagtctaacgctgaactgacaatgaagggaaattgtttatgtgttatgaacatccaagtctttcttcttttttaagttgtcaaagaagcttccacaaaattagaaaggacaacagttctgagctgtaatttcgccttaaactctggacactctatatgtagtgcatttttaaacttgaaatatataatattcagccagcttaaacccatacaatgtatgtacaatacaatgtacaattatgtctcttgagcatcaatcttgttactgctgattcttgtaaatctttttgcttctactttcatcttaaactaatacgtgccagatataactgtcttgtttcagtgagagacgccctatttctatgtcatttttaatgtatctatttgtacaattttaaagttcttattttagtatacatataaatatcagtattctgacatgtaagaaaatgttacggcatcacacttatattttatgaacattgtactgttgctttaatatgagcttcaatataagaagcaatctttgaaataaaaaaagatttttttttaaaaaaaaaaaaaaa

SEQ ID NO: 598 - DNA, 823 bp, Homo sapiens
  misc_feature: Incyte ID No: 245057.10
  unsure 779: a, t, c, g, or other
gcctgtgggatgggggtggcacgggggagagagagatgtgggttacaaagctgccatctagaggctagaggctcctttctgcagtgtatataatgcaagtctgcagccagcagagctcacagttgttgcaaagtgctcagcactaagggagccagcgcacagcacagccaggaaggcgagcgagcccagccagcccagccagcccagccagcccggaggtcatttgattgcccgcctcagaacgatggatctgcatctcttcgactactcagagccaggaacttctcggacatcagctggccatgcaacagcagcgactgcatcgtggtggacacggtgatgtgtcccaacatgcccaacaaaagcgtcctgctctacacgctctccttcatttacattttcatcttcgtcatcggcatgattgccaactccgtggtggtctgggtgaatatccaggccaagaccacaggctatgacacgcactgctacatcttgaacctggccattgccgacctgtgggttgtcctcaccatcccagtctgggtggtcagtctcgtgcagcacaaccagtggcccatgggcgagctcacgtgcaaagtcacacacctcatcttctccatcaacctcttcggcagcattttcttcctcacgtgcatgagcgtggaccgctacctctccatcacctacttcacaacaccccagcagcaggaagaagatggtacgccgtgtcgtctgcatcctggtgtggctgctggccttctgcgtgtctctgctgaaanctataactgtagacgtcacgtctgcgtcaccaatgagacctact

SEQ ID NO: 599 - DNA, 684 bp, Homo sapiens
  misc_feature: Incyte ID No: 474457.35
atttgttgcctgtgtcaaggggcagtgcttcagtcggggtggagctgcttaaaaggcctgggatcacaccctttgggaacacatccaagcttaagacggtgaggtcagcttcacattctcaggaactctccttctttgggccacggaattaacccgagcaggcatggaggcctctgctctcacctcatcagcagtgaccagtgtggccaaagtggtcagggtggcctctggctctgccgtagttttgcccctggccaggattgctacagttgtgattggaggagttgtggctgtgcccatggtgctcagtgccatgggcttcactgcggcgggaatcgcctcgtcctccatagcagccaagatgatgtccgcggcggccattgccaatgggggtggagttgcctcgggcagccttgtggctactctgcagtcactgggagcaactggactctccggattgaccaagttcatcctgggctccattgggtctgccattgcggctgtcattgcgaggttctactagctccctgcccctcgccctgcagagaagagaaccatgccaggggagaaggcacccagccatcctgacccagcgaggagccaactatcccaaatatacctggggtgaaatataccaaattctgcatctccagaggaaagtgagaaatagagatgaagtgttgt

SEQ ID NO: 600 - DNA, 644 bp, Homo sapiens
  misc_feature: Incyte ID No: 474457.45
taagacggtgaggtcagcttcacattctcaggaactctccttctttgggtctggctgaagttgaggatctcttactctctaggccacggaattaacccgagcaggcatggaggcctctgctctcacctcatcagcagtgaccagtgtggccaaagtggtcagggtggcctctggctctgccgtagttttgcccctggccaggattgctacagttgtgattggaggagttgtggctgtgcccatggtgctcagtgccatgggcttcactgcggcgggaatcgcctcgtcctccatagcagccaagatgatgtccgcggcggccattgccaatgggggtggagttgcctcgggcagccttgtggctactctgcagtcactgggagcaactggactctccggattgaccaagttcatcctgggctccattgggtctgccattgcggctgtcattgcgaggttctactagctccctgcccctcgccctgcagagaagagaaccatgccaggggagaaggcacccagccatcctgacccagcgaggagccaactatcccaaatatacctggggtgaaatataccaaattctgcatctccagaggaaaataagaaataaagatgaattgttgcaactctaaaaaaaaaaa

SEQ ID NO: 601 - DNA, 660 bp, Homo sapiens
  misc_feature: Incyte ID No: 3886578CB1
cttaagacggtgaggtcagcttcacattctcaggaactctccttctttgggtctggctgaagttgaggatctcttactctctaggccacggaattaacccgagcaggcatggaggcctctgctctcacctcatcagcagtgaccagtgtggccaaagtggtcagggtggcctctggctctgccgtagttttgcccctggccaggattgctacagttgtgattggaggagttgtggccatggcggctgtgcccatggtgctcagtgccatgggcttcactgcggcgggaatcgcctcgtcctccatagcagccaagatgatgtccgcggcggccattgccaatgggggtggagttgcctcgggcagccttgtggctactctgcagtcactgggagcaactggactctccggattgaccaagttcatcctgggctccattgggtctgccattgcggctgtcattgcgaggttctactagctccctgcccctcgccctgcagagaagagaaccatgccaggggagaaggcacccagccatcctgacccagcgaggagccaactatcccaaatatacctggggtgaaatataccaaattctgcatctccagaggaaaataagaaataaagatgaattgttgcaactcttaaaaaaaaaaaaaaa

SEQ ID NO: 602 - DNA, 991 bp, Homo sapiens
  misc_feature: Incyte ID No: 474457.44
ggagaaagtcatggtctccctcactaataaacactgaccctgcttcggatgagctaacagccctgctcagaaagcatgacacccatcctgttcacttttccctgccccggtcaaaccaccaagccctagatttcattgccaagtatcctgtatttactgggaatggacatcacagtagcatgccttcctagccacatctatgaggttttgttcattttcattctgctttttgtttgagctaaacctgccttgggaggcagaaaagaaaagataacatctgattcccccgatcaaccaaccaatcaactaggtcagggccacgtaaattcattcaggacaagcactgaggtcaaactccccagtgatcctcaccctcctccagaatttccacttcccgaaatgaagcaaagagcggtagacaggagtcatcccttcttgtggctcccaacctggggcagccccctgcctccctttagatgggcaatcggcttagaaagtggaggggaagccagtgtggatctactcacagaatgttcttttggtttccagccaggattgctacagttgtgattggaggagttgtggccatggcggctgtgcccatggtgctcagtgccatgggcttcactgcggcgggaatcgcctcgtcctccatagcagccaagatgatgtccgcggcggccattgccaatgggggtggagttgcctcgggcagccttgtggctactctgcagtcactgggagcaactggactctccggattgaccaagttcatcctgggctccattgggtctgccattgcggctgtcattgcgaggttctactagctccctgcccctcgccctgcagagaagagaaccatgccaggggagaaggcacccagccatcctgacccagcgaggagccaactatcccaaatatacctggggtgaaatataccaaattctgcatctccagaggaaaataagaaataaagatgaattgttggcaa

SEQ ID NO: 603 - DNA, 600 bp, Homo sapiens
  misc_feature: Incyte ID No: 231486.20
gaggtactttgtgagcccagatctccattttttcccaatgggaaattattgccaagttcctacatcttgatattgctttcgtaatttatactaacataaaataatatttttcactgttttgcaatgtctttttaatttctgtattgcagctagaggaagtccaaagaaaacttggatttgctctttctgacatctcggtggttagcaattattcctctgagtgggagctggaccctgtaaaggatgttctaattctttctgctctgagacgaatgctatgggctgcagatgacttcttagaggatttgccttttgagcaaatagggaatctaagggaggaaattatcaactgtgcacaaggaaaaaaatagatatgtgaaaggttcacgtaaatttcctcacatcacagaagattaaaattcagaaaggagaaaacacagaccaaagagaagtatctaagaccaaagggatgtgttttattaatgtctaggatgaagaaatgcatagaacattgtagtacttgtaaataactagaaataacatgatttagtcataattgtgaaaaataataataatttttcttggatttatgttctgtat

SEQ ID NO: 604 - DNA, 4058 bp, Homo sapiens
  misc_feature: Incyte ID No: 1330200.36
gcgcggcggctgcgaccgggacggcccattttccgccagctcgccgctcgctatggcgtcgctcaccgtgaaggcctaccttctgggcaaggaggacgcggcgcgcgagattcgccgcttcagcttctgctgcagccccgagcctgaggcggaagccgaggctgcggcgggtccgggaccctgcgagcggctgctgagccgggtggccgccctgttccccgcgctgcggcctggcggcttccaggcgcactaccgcgatgaggacggggacttggttgccttttccagtgacgaggaattgacaatggccatgtcctacgtgaaggatgacatcttccgaatctacattaaagagaaaaaagagtgccggcgggaccaccgcccaccgtgtgctcaggaggcgccccgcaacatggtgcaccccaatgtgatctgcgatggctgcaatgggcctgtggtaggaacccgctacaagtgcagcgtctgcccagactacgacttgtgtagcgtctgcgagggaaagggcttgcaccgggggcacaccaagctcgcattccccagccccttcgggcacctgtctgagggcttctcgcacagccgctggctccggaaggtgaaacacggacacttcgggtggccaggatgggaaatgggtccaccaggaaactggagcccacgtcctcctcgtgcaggggaggcccgccctggccccacggcagaatcagcttctggtccatcggaggatccgagtgtgaatttcctgaagaacgttggggagagtgtggcagctgcccttagccctctgggcattgaagttgatatcgatgtggagcacggagggaaaagaagccgcctgacccccgtctctccagagagttccagcacagaggagaagagcagctcacagccaagcagctgctgctctgatcccagcaagccgggtgggaatgttgagggcgccacgcagtctctggcggagcagatgagaaagatcgccttggagtccgaggggcgccctgaggaacagatggagtcggataactgttcaggaggagatgatgactggacccatctgtcttcaaaagaagtggacccgtctacaggtgaactccagtccctacagatgccagaatccgaagggccaagctctctggacccctcccaggagggacccacagggctgaaggaagctgccttgtacccacatctcccgccagaggctgacccgcggctgattgagtccctctcccagatgctgtccatgggcttctctgatgaaggcggctggctcaccaggctcctgcagaccaagaactatgacatcggagcggctctggacaccatccagtattcaaagcatcccccgccgttgtgaccacttttgcccacctcttctgcgtgcccctcttctgtctcatagttgtgttaagcttgcgtagaattgcaggtctctgtacgggccagtttctctgccttcttccaggatcaggggttagggtgcaagaagccatttagggcagcaaaacaagtgacatgaagggagggtccctgtgtgtgtgtgtgctgatgtttcctgggtgccctggctccttgcagcagggctgggcctgcgagacccaaggctcactgcagcgcgctcctgacccctccctgcaggggctacgttagcagcccagcacatagcttgcctaatggctttcactttctcttttgttttaaatgactcataggtccctgacatttagttgattattttctgctacagacctggtacactctgattttagataaagtaagcctaggtgttgtcagcaggcaggctggggaggccagtgttgtgggcttcctgctgggactgagaaggctcacgaagggcatccgcaatgttggtttcactgagagctgcctcctggtctcttcaccactgtagttctctcatttccaaaccatcagctgcttttaaaataagatctctttgtagccatcctgttaaatttgtaaacaatctaattaaatggcatcagcactttaaccaatgacgtttgcatagagagaaatgattgacagtaagtttattgttaatggttcttacagagtatctttaaaagtgccttaggggaaccctgtccctcctaacaagtgtatctcgattaataacctgccagtcccagatcacacatcatcatcgaagtcttccccagttataaagaggtcacatagtcgtgtgggtcgaggattctgtgcctccaggaccaggggcccaccctctgccccagggagtccttgcgtcccatgaggtcttcccgcaaggcctctcagacccagatgtgacggggtgtgtggcccgaggaagctggacagcggcagtgggcctgctgaggccttctcttgaggcctgtgctctgggggtcccttgcttagcctgtgctggaccagctggcctggggtccctctgaagagaccttggctgctcactgtccacatgtgaactttttctaggtggcaggacaaatcgcgcccatttagaggatgtggctgtaacctgctggatgggactccatagctccttcccaggacccctcagctccccggcactgcagtctgcagagttctcctggaggcaggggctgctgccttgtttcaccttccatgtcaggccagcctgtccctgaaagagaagatggccatgccctccatttgtaagaacaatgccagggcccaggaggaccgcctgccctgcctgggccttggctgggcctctggttctgacactttctgctggaagctgtcaggctgggacaggctttgattttgagggttagcaagacaaagcaaataaatgccttccacctcaccgcaaaccttctgctaaattgcatgaccaggctttccaaaaacaagacattctcatgtcatcaggtgatccatctcctggggaccttagaatcaggttaccggtgcctacaaaagaattttgagcagaagggcctcgagacatcgggaaaggggtgcgctggctccattctgctacctcccaccggggggcagctctccagagcctgccgggttctgcagctgcagaggtggcagcaccgagctccctgtgggataggactggtgctggggtctggcttctctcaccccaggaaccaaagatgctctgaaagttgggtgtcggccgtgagccactgtacccggcagcttcaaccttttcataatcacaagttgggaagaataaaggagaaaaataatttaaatattacagatggaggtacttgtagttaagcctgcttttacctctgctccccccttaaactctattgaaataacaggaaagggcttacacaaaaaaagaaaacaccatagacaaagaaaataatagaggaaaagacaaagatgtgatcagattttggaagatggacatggagggagggtggcaacctgctgagggaagctcagaaatctctgtgccagaacagggcatcctggtgagaaggaagaccatctgttcaggtaccaggaaaggcaagaggtgggagtgatcgggggacaggaacaaggggggagggttgaaaacctctagggagtgtcagctagagacttcagggcccacttggccagatgatggctcttgccaacaattgaaggagacctcatgtttaattccaggagcacctgacccagggaagcttcagcatgggatactagagacaggccagggtgaggcaccagcctgaaactgggcatcccgaatgagcaatgggcccagcagtcagttccctggccaggcaggaggtggggagtccctgctgagggaggttgaatgcccccagagaagtgtcctacagctcctgcctgccagacccccaggcaccctgcagagggaaagttagtgatggcgctggccccacagaaggcttcctgtcaaccttagtgcttcagtgggatcagacccctgggtcaccagccatctgaggaaagcccccacacatgggagaaaaggtcttaaagggaagagaatgttaatgtcctcagtgagatacaaaagagcttatctt

SEQ ID NO: 605 - DNA, 427 bp, Homo sapiens
  misc_feature: Incyte ID No: 1040491.6
gtgaagcacatgtgacaatgaaggacggatgtatcaccttgatgattatggtgttggggtcctgattccagcattcatgagtcaggggaaggtccctgctaaggacagaccttaggagggcagttggtccagaacccacaactgctttccccatgtttcctgatcctgccctgggtctgcagtcatagttctggaaacttctcttgggtccaagactaggaggttcccctaagatcgcatggccctgcctcctccctgtcccctcacagggcattttcttcccacaggtggaaaaggagggagctgctctcaggctgcgtccagcaacagtgcccagggctctgatgagtctctcatcgcttgtaaagcctgagacagctgcctgtgtgggactgagatgcaggatttcttcacacctctcctttgt

SEQ ID NO: 606 - DNA, 2609 bp, Homo sapiens
  misc_feature: Incyte ID No: 233469.1
ccgggtagtgagcggagggacaggaagggtagggcaagaaagggagaggggacaggagggaagggtgggccaaagcggtgagaaaggagggccagccagttgcgtgggggagagtggccgaggcccgggggcaggagtgcagggctctgaggcggggagaggagaggagagaagagccgcggggggcccagcccggagccaggatgcccgcgccgcgcgcccgggagcagccccgcgtgcccggggagcgccagccgctgctgcctcgcggtgcgcggggccctcgacggtggcggcgggcggcgggcgcggccgtgctgctggtggagatgctggagcgcgccgccttcttcggcgtcaccgccaacctcgtgctgtacctcaacagcaccaacttcaactggaccggcgagcaggcgacgcgcgccgcgctggtattcctgggcgcctcctacctgctggcgcccgtgggcggctggctggccgacgtgtacctgggccgctaccgcgcggtcgcgctcagcctgctgctctacctggccgcctcgggcctgctgcccgccaccgccttccccgacggccgcagctccttctgcggagagatgcccgcgtcgccgctgggacctgcctgcccctcggccggctgcccgcgctcctcgcccagcccctactgcgcgcccgtcctctacgcgggcctgctgctactcggcctggccgccagctccgtccggagcaacctcacctccttcggtgccgaccaggtgatggatctcggccgcgacgccacccgccgcttcttcaactggttttactggagcatcaacctgggtgctgtgctgtcgctgctggtggtggcgtttattcagcagaacatcagcttcctgctgggctacagcatccctgtgggctgtgtgggcctggcatttttcatcttcctctttgccacccccgtcttcatcaccaagcccccgatgggcagccaagtgtcctctatgcttaagctcgctctccaaaactgctgcccccagctgtggcaacgacactcggccagagaccgtcaatgtgcccgcgtgctggccgacgagaggtctccccagccaggggcttccccgcaagaggacatcgccaacttccaggtgctggtgaagatcttgcccgtcatggtgaccctggtgccctactggatggtctacttccagatgcagtccacctatgtcctgcagggtcttcacctccacatcccaaacattttcccagccaacccggccaacatctctgtggccctgagagcccagggcagcagctacacggagtcctggagatggagcgcttacactacatccaccacaacgagaccgtgtcccagcagattggggaggtcctgtacaacgcggcaccactgtccatctggtggcagatccctccagtacctgctcattgggatcagtgagatctttgccagcatcccaggcctggagtttgcctactcagaggccccgcgctccatgcagggcgccgatgggcaagccaagtgtcctctatgcttaagctcgctctccaaaactgctgcccccagctgtggcaacgacactcggccagagaccgtcaatgtgcccgcgtgctggccgacgagaggtctccccagccaggggcttccccgcaagaggacatcgccaacttccaggtgctggtgaagatcttgcccgtcatggtgaccctggtgccctactggatggtctacttccagatgcagtccacctatgtcctgcagggtcttcacctccacatcccaaacattttcccagccaacccggccaacatctctgtggccctgagagcccagggcagcagctacacgatcccggaagcctggctcctcctggccaatgttgtggtggtgctgattctggtccctctgaaggaccgcttgatcgaccctttactgctgcggtgcaagctgcttccctctgctctgcagaagatggcgctggggatgttctttggttttacctccgtcattgtggcaggagtcctggagatggagcgcttacactacatccaccacaacgagaccgtgtcccagcagattggggaggtcctgtacaacgcggcaccactgtccatctggtggcagatccctcagtacctgctcattgggatcagtgagatctttgccagcatcccaggtaccctggatcccctcccctgctcctgcaccagtgatgggctctgcccggtggcacctcaaagtcaggtaccccagggatgcagcccccagggcccatctgcatggaggaaggcagtgttttctgaccagggctcattcacccaacgggggtctataattagcacctggttcaagtcagcccctatgtgacaggcactgcgggaattttggcagcgcgaaagcaagaaacttcccacaccggctctccacgtattcccctggtgccaggttctccaccctctggtgggtcttttgaacgttggcttgttgccctcatacgcttagaactggaaggtgaactccaatatccccttcaattctgagcctaaatacaaggtcctgggcagaaggggtcctccttcccgccgtgttcattctctat

SEQ ID NO: 607 - DNA, 3162 bp, Homo sapiens
  misc_feature: Incyte ID No: 1723675CB1
gctggcgctccggagttgctgggctcagcgcactcccattcattaaggaaccagctgcggaggaaggtggccgagcgcccgcgctgcccactcgctcgctcgcgcactcagacgcgcgccacaacagcgcgccccaagctgcgcagctctgcaaaagtttctgctcgggatctggctctcttccccttggactttagaacgatttagggttgacagaggaaagcagaggcgcgcaggaggagcagaaaacaccaccttctgcagttggaggcaggcagccccggctgcactctagccgccgcgcccggagccggggccgacccgccactatccgcagcagcctcggccaggaggcgacccgggcgcctgggtgtgtggctgctgttgcgggacgtcttcgcggggcgggaggctcgcgccgcagccagcgccatgcaaaactacaagtacgacaaagcgatcgtcccggagagcaagaacggcggcagcccggcgctcaacaacaacccgaggaggagcggcagcaagtgggtgctgctcatctgcctcgacctcttctgcctcttcatggcgggcctccccttcctcatcatcgagacaagcaccatcaagccttaccaccgagggttttactgcaatgatgagagcatcaagtacccactgaaaactggtgagacaataaatgacgctgtgctctgtgccgtggggatcgtcattgccatcctcgcgatcatcacgggggaattctaccggatctattacctgaagaagtcgcggtcgacgattcagaacccctacgtggcagcactctataagcaagtgggctgcttcctctttggctgtgccatcagccagtctttcacagacattgccaaagtgtccatagggcgcctgcgtcctcacttcttgagtgtctgcaaccctgatttcagccagatcaactgctctgaaggctacattcagaactacagatgcagaggtgatgacagcaaagtccaggaagccaggaagtccttcttctctggccatgcctccttctccatgtacactatgctgtatttggtgctatacctgcaggcccgcttcacttggcgaggagcccgcctgctccggcccctcctgcagttcaccttgatcatgatggccttctacacgggactgtctcgcgtatcagaccacaagcaccatcccagtgatgttctggcaggatttgctcaaggagccctggtggcctgctgcatagttttcttcgtgtctgacctcttcaagactaagacgacgctctccctgcctgcccctgctatccggaaggaaatcctttcacctgtggacattattgacaggaacaatcaccacaacatgatgtaggtgccacccacctcctgagctgtttttgtaaaatgactgctgacagcaagttcttgctgctctccaatctcatcagacagtagaatgtagggaaaaacttttgcccgactgatttttaaaaaggaaaaaaaaaatgttttactatgtggccttccaaaataggtagtgtttgcctatgtggaaacaacagcaaactaacaccaagtgccagagtcctggatgtgcaattggtttaagtgttcatgttctagtgaacacagcttgttcaggaacaaacactaaaacgatttgagtagaggctgctggtcaccttttgtgacctgaggaatcccaggcctgtgagaaaagcaaaaattcacattgcagcacatgatgccagaaatagcactgaatcaagaaaatagccattgcggagctgccctcttgagtctttctgtccatcccattctattctgtactgtgactttagttcaggaagttttgttttgtgttttaaataaaaggaaagagcaagtttgctcagtcaagtgatcagatcccgaatctagattcccagttctaaggccttatcacctcccctgcccataggccaacaaccatagttcctcacattagtgattagcagactctttgtggacgagtgaatttcacaaacagcacaatttcagaagaaatcgagggcacaggccctcacttttcttcttttgacgcatcatcctgtgatgttgaaatgtcaattgcaggatgctgatgttgtgcacgtcaatcaccgggcacttgcatactcttagaaacagttcgacttcggttactgccttctcccttgaaatccttgctgcgtgcccaccaggatttcctgtgagggcccgggaatgagcaaggcatggtctgccaccagctgacggaaagcagccttctgtacaacagatgggagggtgaagggggcagaatgaaaatcgaaccaaccttttagctgttgcaaatcagaaggagccagagaagcaggcagtctcatgcatgagaggttacccttcaggatgacagagctgagggtctttgtaggagttgctcttgctgtgtaaagcactattgtcttggggttgagccctagggcagttcttggtaggttctgctgggcagaacatatgggttaaatctcggtagagagttttcctcatcctctatccgtaagtgtccttccatgcaaggtcccactctaggtgatagacagggaccccttctactgaacctttgaggaaaggaggaaggaagaaatgcgtttagatcttggatgcagacctttcaaagggttaaatgtaaccatatggatcaaccacatgcacatccttactacagaatccgtcctttcatttcaacttatagcaagctatgatttttatatataaatattatataaataatgtataaaacattaaaagttaactatgtaagatattatttctgaaacaatttagctatatccactatgattataaactgtgtctcgacctgtgttatttacattagctgcttaaaaaagcattgagttaatttttttaaatatcaactaaaatatcatagttctgtggtagacattgttttataatgaaataactgcaactagagaaaactgtataaaaacattaaattgtcagtatttttgtaaggttccattttgtaaagagaataatattcaaagacttttgtagcatacaaagtgaaaacttgtatctgcgaaactatacttgtattaaatgtgctttttaaataaaagctcgtaacacaactaaaaaa

SEQ ID NO: 608 - DNA, 1344 bp, Homo sapiens
  misc_feature: Incyte ID No: 279117.16
ctctgttaatacaactatatgtgtacatagttttgtgaatttcagctacattcagtccccacctgccctcctagaggagttgccttagtctgagcaaagtccattcaaccctatatgatggccctgggctttcctcaggcagaattgtaaaattaggaaacttctacttcggagctcatttgttcatacactcttcatcttttattcacaccccactagttatccactctcaacctcaacccttggcgtggggcatttcatcaagttacttattggtatttgcctttactccaaactgctaatcttttctaggtgcttagcatttcatgtttggcaactcacagtgggtagtaataagccttttcatcatatttaatctttcagtctgtgtaaactgtgcttctcctaaagcagaagtctaataggagttttgttcattaacttcctgatggcttctagaaatgtcatcaaagaaacatttcatatttatatccttttttgcttaaattttcttttgggtcaattcaaataatttattaatgtctatattaatataaaatagaaattgttaaatatttcaggaaaactttctgaaatataatttctccgtacaatgaaacagtttttttcatatatctataaatagatacaggagcctccagttatctaatgagggttacatatggtgcataattttaataccatatttgtttcatcttacttcaaatttgaaagtacttttgctataagtttcctaaaagtatttaatacttttttttttcaatttagattaaatctcttgatgaacagtgtgtggttggcaaaatttccaagcactggactggaattttgagagaggcatttacagacgctgataactttggaatccagttccctttagaccttgatgttaaaatgaaagctgtaatgattggtgcctgtttcctcattgacttcatgttttttgaaagcactggcagccaggaacaaaaatcaggagtggtagtggattagtgaaagtctcctcaggaaatctgaagtctgtatattgattgagactatctaaactcatacctgtatgaattaagctgtaaggcctgtagctctggttgtatacttttgcttttcaaattatagtttatcttctgtataactgatttataaaggtttttgtacattttttaatactcattgtcaatttgagaaaaaggacatatgagtttttgcatttattaatgaaacttcctttgaaaaactgctttgaattatgatctctgattcattgtccattttactaccaaatattaactaaggccttattaatttttatataaattatatctt

SEQ ID NO: 609 - DNA, 2540 bp, Homo sapiens
  misc_feature: Incyte ID No: 181172CB1
cacctcctcccgccaggcgctttctcggacgccttgcccagcgggccgcccgaccccctgcaccatggaccccgctcgccccctggggctgtcgattctgctgcttttcctgacggaggctgcactgggcgatgctgctcaggagccaacaggaaataacgcggagatctgtctcctgcccctagactacggaccctgccgggccctacttctccgttactactacgacaggtacacgcagagctgccgccagttcctgtacgggggctgcgagggcaacgccaacaatttctacacctgggaggcttgcgacgatgcttgctggaggatagaaaaagttcccaaagtttgccggctgcaagtgagtgtggacgaccagtgtgaggggtccacagaaaagtatttctttaatctaagttccatgacatgtgaaaaattcttttccggtgggtgtcaccggaaccggattgagaacaggtttccagatgaagctacttgtatgggcttctgcgcaccaaagaaaattccatcattttgctacagtccaaaagatgagggactgtgctctgccaatgtgactcgctattattttaatccaagatacagaacctgtgatgctttcacctatactggctgtggagggaatgacaataactttgttagcagggaggattgcaaacgtgcatgtgcaaaagctttgaaaaagaaaaagaagatgccaaagcttcgctttgccagtagaatccggaaaattcggaagaagcaattttaaacattcttaatatgtcatcttgtttgtctttatggcttatttgcctttatggttgtatctgaagaataatatgacagcatgaggaaacaaatcattggtgatttattcaccagtttttattaatacaagtcactttttcaaaaatttggatttttttatatataactagctgctattcaaatgtgagtctaccatttttaatttatggttcaactgtttgtgagactgaattcttgcaatgcataagatataaaagcaaatatgactcactcatttcttggggtcgtattcctgatttcagaagaggatcataactgaaacaacataagacaatataatcatgtgcttttaacatatttgagaataaaaaggactagcaaataaaactcattttgcatttaaaagttggattatattttagtcccaagaagacaaagtcgcagattaacaacactttaaaaatattactcccattttattgtgttagattgcagtacaatgaatgaataaggggatttatttaaaagatcttaactttcttgactgatttaaaaagctaatcaatttattaaagccagaaatgttctcctctgggaaagcaatttctatctatttatctaccaatccccactcacatgtatatgtttgtgtttacatagagatagatggttttaagggttttcctattgttaaattatttcctaagacattgtgggttggagaccactaaacttataaaaaaccaaggaaagtaaagtttttcaaatgtttatactgtttaaggtgtttatttatataaaccatgcatgagaaaccatgcataaatttaataatttaaatttcaccagtaaattatcattgattaaatatggtcataccaatgaaataggttttttctttctctgtaataaaacaatttttctaaattcttatgttttcatagcaagattaacatatttaattacaaattaaatatgcaaaatgacaaatgcgtttaccttttgcttgaacaatctttcatttaaaaatttatcccagttattttgacaaataggtatatgcctgagaactttgaatgatgctgaaagctagaagcaaaccaggtactcttcagtcagggactggttgaagattttatggataaggagttagcaaaatatctatatatgcatatcttctgactcccaggatacataagaaacacagggcctagaacagtatgaataaacacacatatacacaaacatcacagaagatactaaagatattaaaaatgtttacctatagaggtttggagagaacagaggggtggacagttgtggagataatatttgtgtaaatataactgtgatatagtttttatcttggaccatgtaaatatttgacataattaataatcacaattagataaaccagaaaaagcattagacaactcaaaggcggaaaaaaacaagagtggggaagctaagaggtaaacgagatgttgtagatgaaagatgtgataaaaagaaaaaaaaggggggcggcccgccgagaataattggaggcccccttatgcaccccgggggatattttattctcccgtggagaccggtgtgacctctgtgaagggggggtgtaatacccggggtttattgtccccgctcaagaggggagagagggcgcgcagatatttagagaaggacttttttgtggcggtgacagtaccccagaagggggctcactatagggattggtgattctcacccgcgcgagaggggtgagaata

SEQ ID NO: 610 - DNA, 4908 bp, Homo sapiens
  misc_feature: Incyte ID No: 475127.3
  unsure 265, 282, 287: a, t, c, g, or other
gcgtcgacaagaaccatacattatcgttactctgccagcccagtcatggagactgtagtagattctcagcaagtacatgtttgatacgttcacgtttccattttaatttcaatacatttaaaatattttgaaaattaggtgacagtatgttgactgctgtctctgtggccagagattgtggaatgattctacctcaggataaagtgattattgctgaagcattacctccaaaggatgggaaagttgccaaaataaattggcattntgcagactccctcacgnagtgnagtcctccatcagcaattgacccagaggctattccggttaaatggtccatgatagcttagaggatcttcaaatgactcgttatcatgtgcaatgaatggaaaatcattctcagtgatactggagcattttcaagaccttgttcctaagtgatgttgcatggcaccggttgcccgtatggcacctgatcagaagacacagtgatagaagcatgcaaaatgttgattattttgttgggatgtgtggtgatggcgcaaatgattgtggtgcttgaagagggcacacggaggcatttccttatcggagctcgaagcttcagtggcatctccctttacctctaagactcctagtatttcctgtgtgccaaaccttatcagggaaggccgtgctgctttaataacttccttctgtgtgtttaaattcatggcattgtacagcattatccagtacttcagtgttactctgctgtattctatcttaagtaacctaggagacttccagtttctcttcattgatctggcaatcattttggtagtggtatttacaatgagtttaaatcctgcctggaaagaacttgtggcacaaagaccaccttcgggtcttatatctggggcccttctcttctccgttttgtctcagattatcatctgcattggatttcaatctttgggttttttttgggtcaaacagcaaccttggtatgaagtgtggcatccaaaatcagatgcttgtaatacaacaggaagcgggttttggaattcttcacacgtagacaatgaaaccgaacttgatgaacataatatacaaaattatgaaaataccacagtgttttttatttccagttttcagtacctcatagtggcaattgccttttcaaaaggaaaacccttcaggcaaccttgctacaaaaattatttttttgttttttctgtgatttttttatatatttttatattattcatcatgttgtatccagttgcctctgttgaccaggttcttcagatagtgtgtgtaccatatcagtggcgtgtaactatgctcatcattgttcttgtcaatgcctttgtgtctatcacagtggagaacttcttccttgacatggtcctttggaaagttgtgttcaaccgagacaaacaaggagagtatcggttcagcaccacacagccaccgcaggagtcagtggatcggtggggaaaatgctgcttaccctgggccctgggctgtagaaagaagacaccaaaggcaaagtacatgtatctggcgcaggagctcttggttgatccagaatggccaccaaaacctcagacaaccacagaagctaaagctttagttaaggagaatggatcatgtcaaatcatcaccataacatagcagtgaatcagtctcagtggtattgctgatagcagtattcaggaatatgtgattttaggagtttctgatcctgtgtgtcagaatggcactagttcagtttatgtcccttctgatatagtagcttatttgacagctttgctcttccttaaaataaaaacagaaaaatatatcgtcctaacagttaaattaacaatcaatccataaagtcctatatcttcattcagcaacccaaatattacatacatttccagaattttcttgattgttactttcagtgatattctttatattgggtacaggagaagtttggtgtttggtaggtttttcaacattagtttttgagactagtttacctcttcacatttatgctcacaaccctcttgttagaaaagtctgtgtttatatacaggctgtaagtttgtgattgataaaaagaagatgagtgttaattagcctccagtgaaaatatactgaaagcctgttttcatttgattccaatgtttcttccaaagaattctgtataaacatatgccaattccctatgatggtctagagttaggaatgagtgtttatggtgttgcttatagaacaactcaggtaatctccatttctggttttatattttctgtacaaactgcctgggttttatttttctaatcagcaaggtgcttcactgccttcttgagacgcctctcaaagctcttaaatggctcctgtgctatgtgtggtgttggcagtctaatttgcttctgttaaatgttgtagaacctttttcactaggaaataagattcatttctttcggcagtagatgtagattcatcttttaacgtttcttcaaatttgtttctgtcaggctttgtgttattttaaatggttttttaaaattttcttctatgttttcaattacctaaagacataggataatagttttttttaagttagaattttacctcataaaattttttgaggtttgatgtatgtctctgtcttatcaataatgaggcttaaaaaatactggatttgaatggctgccgttttttcaaagcaatatgaatttgatgagtttgttttatgccattaggtggcgccagaggtcagaacatgtctattttgaattggatcgttacaaatgagcatatttgatgcggaaatttctgggagaaaaaaaattgaggaaataaagttaaaaaattgacattcattgagccaaaagagatgtggagaaacatttttcacctttctgtttggcctgattaacatttaaattcttgccaaaattaaggtaacttttaaaaaacaccttttataggtggatccagcagtctggcaacgcccacagttaccacaacacagaaaactgatcgtgctataaaatggacgctaaactatgaaaacagtgtgacattgttctctgttcttccagagccagtaacatgcttgctcgtgctttctacttctagctgatcattcttttcccaacatatatttacaaatttaccaaattttacctagaattttaggaccaaatggttctcactctttatgctgcaaagacctggatgatgtttggtaactatagaaaaatagaaattacactcaggatcactgttactgctattgccactgatgattcctgcaaaaatataatcgaagttttccatcaaatgtataatatgctattaatacacattagatgataacagttgttccatgaatgattctatgaagctatgcatcttagacctcttgagctgtgaattagcactattttctatagttacttattctctggatcattttataatttccatattaatttcaaatatgctcgtgttattcttcagtgatttccacaattgtgcattttattctttggtttaagtactgaagcatataatgaaagtaattgctaagtagcagcttaaaaattcaattatccgattgtatttaacatctttaagagcatgatcataaagagctatttttgacaccccccccccacttttttaacatttagagttagtaagggttttatatctcttctgtccatattgttttcaaaggaatgaggtgtttaggtggctggaaaagcatttgtaggaagttagatttgaatatagacaaggtgggttattcacgttgagaatgttatttgaagaatgcctgtgaagccaggtgtgggttctactcagtgccatagatagactgagtcttctctcgtaggttaccattacatagtaattttgattctgaatttcacattaaattatttgagtttatacagacctaaattttaaaatctgtacatatattattttgatgtattaagatgaatattgctgatttaaattttatttatgcacatacttaaaggacagaaatgtctgggaaagtaattgttaaataatgatatgtaactttttaactttttaaataaataacaagatttttaatgtgtgtctccctcagggttgtttaaagttttttttctccctcaagtataaatagtggtaactatatgttttgtatcttctagcaccaactgctgtaaagcaatgctgcaaataatgcttgaatacaagtggctaagccaacaacagaataaatacttttatagtagttttataatcctgaaattcgaaagctttcccaattgcacttgcatctaaacaaaactgttgcagtttttactctatttattttgttccccatgtttatgaaagtcctgcacagtttcaaaggcatggtaaataatatatcaatgtttatgtagtctgttacagaaacagctatagataacattatccagtgaagagcaaaattcaagctttagaaaatattcatgcatgcaattttgacatatctaaaaataggtttttgtatatttatggtgggaggtggttgggaacttttaacaaaatggggtgttaatttttgtacagtctgtgggcatttacacatttttaatgtattaaaatttggtaattatgtgtacattaaattaataaaagttacttctagttatgatttgtgaattccctaagaccttggatttttttaagtaactttatatcagaaatgatactgcatctttatatttttaaaattgtattgctgctcaagaatggtaccctcttgtcaaaaaggcatacattcataattgtacattcagcattgtaaataatcttatgaaaccttttttgattgaagctattcaaaataaaaattttaatgaatgaaaaaaaaaacac

SEQ ID NO: 611 - DNA, 4389 bp, Homo sapiens
  misc_feature: Incyte ID No: 2814863CB1
  unsure 4386, 4389: a, t, c, g, or other
cgccgaccgagcagtgacttaagcaacggagcgcggtgaagctcatttttctccttcctcgcagccgcgccagggagctcgcggcgcgcggcccctgtcctccggcccgagatgaatcctgcggcagaagccgagttcaacatcctcctggccaccgactcctacaaggttactcactataaacaatatccacccaacacaagcaaagtttattcctactttgaatgccgtgaaaagaagacagaaaactccaaattaaggaaggtgaaatatgaggaaacagtattttatgggttgcagtacattcttaataagtacttaaaaggtaaagtagtaaccaaagagaaaatccaggaagccaaagatgtctacaaagaacatttccaagatgatgtctttaatgaaaagggatggaactacattcttgagaagtatgatgggcatcttccaatagaaataaaagctgttcctgagggctttgtcattcccagaggaaatgttctcttcacggtggaaaacacagatccagagtgttactggcttacaaattggattgagactattcttgttcagtcctggtatccaatcacagtggccacaaattctagagagcagaagaaaatattggccaaatatttgttagaaacttctggtaacttagatggtctggaatacaagttacatgattttggctacagaggagtctcttcccaagagactgctggcataggagcatctgctcacttggttaacttcaaaggaacagatacagtagcaggacttgctctaattaaaaaatattatggaacgaaagatcctgttccaggctattctgttccagcagcagaacacagtaccataacagcttgggggaaagaccatgaaaaagatgcttttgaacatattgtaacacagttttcatcagtgcctgtatctgtggtcagcgatagctatgacatttataatgcgtgtgagaaaatatggggtgaagatctaagacatttaatagtatcgagaagtacacaggcaccactaataatcagacctgattctggaaaccctcttgacactgtgttaaaggttttggagattttaggtaagaagtttcctgttactgagaactcaaagggttacaagttgctgccaccttatcttagagttattcaaggggatggagtagatattaataccttacaagagattgtagaaggcatgaaacaaaaaatgtggagtattgaaaatattgccttcggttctggtggaggtttgctacagaagttgacaagagatctcttgaattgttccttcaagtgtagctatgttgtaactaatggccttgggattaacgtcttcaaggacccagttgctgatcccaacaaaaggtccaaaaagggccgattatctttacataggacgccagcagggaattttgttacactggaggaaggaaaaggagaccttgaggaatatggtcaggatcttctccatactgtcttcaagaatggcaaggtgacaaaaagctattcatttgatgaaataagaaaaaatgcacagctgaatattgaactggaagcagcacatcattaggctttatgactgggtgtgtgttgtgtgtatgtaatacataatgtttattgtacagatgtgtggggtttgtgttttatgatacattacagccaaattatttgttggtttatggacatactgccctttcattttttttcttttccagtgtttaggtgatctcaaattaggaaatgcatttaaccatgtaaaagatgagtgctaaagtaagctttttagggccctttgccaataggtagtcattcaatctggtattgatcttttcacaaataacagaactgagaaacttttatatataactgatgatcacataaaacagatttgcataaaattaccatgattgctttatgtttatatttaacttgtatttttgtacaaacaagattgtgtaagatatatttgaagtttcagtgatttaacagtctttccaacttttcatgatttttatgagcacagactttcaagaaaatacttgaaaataaattacattgccttttgtccattaatcagcaaataaaacatggccttaacaaagttgtttgtgttattgtacaatttgaaaattatgtcgggacataccctatagaattactaaccttactgccccttgtagaatatgtattaatcattctacattaaagaaaataatggttcttactggaatgtctaggcactgtacagttattatatatcttggttgttgtattgtaccagtgaaatgccaaatttgaaaggcctgtactgcaattttatatgtcagagattgcctgtggctctaatatgcacctcaagattttaaggagataatgtttttagagagaatttctgcttccactatagaatatatacataaatgtaaaatacttacaaaagtggaagtagtgtattttaaagtaattacacttctgaatttatttttcatattctatagttggtatgacttaaatgaattactggagtgggtagtgagtgtacttaaatgtttcaattctgttatattttttattaagtttttaaaaaattaaattggatattaaattgtatggacatcatttattaattttaaactgaatgccctcaataagtaatactgaagcacattcttaaatgaagataaattatctccaatgaaaagcatgacatgtgtttcaatagaagaatcttaagttggctaaattcaaagtgcttgacatcaaaatgttctagagtgattagctactagattctgaatcatacatcacatctgactagagaccagtttctttcgaatgattcttttatgtatgtagatctgttcttctgaggcagcggttggccaactatagcccaaaggccaaatttggacttctttttataaatgcagattgtctatggctgctttcccactactccagcctaaggtaaacagctgcaatagaagccaaatgagaatcgcaaagcccaaaatgtttattaacctgccctttacacaaaattacacaaaaagtttcctgatctctgttctaagaaaaggagtgtgccttgcatttaaaaggaaatgttggtttctagggaagggaggaggctaaataattgatacggaattttcctcttttgtcttcttttttctcacttaagaatccgatactggaagactgatttagaaaagtttttaacatgacattaaatgtgaaattttaaaaattgaaaagccataaatcatctgttttaaatagttacatgagaaaatgatcactagaataacctaattagaagtgttatcttcattaaatgttttttgtaagtggtattagaaagaatatgtttttcagatggttctttaaacatgtagtgagaacaataagcattattcacttttagtaagtcttctgtaatccatgatataaaataattttaaaatgattttttaatgtatttgagtaaagatgagtagtattaagaaaaacacacatttcttcacaaaatgtgctaaggggcgtgtaaagaatcaaaagaaactattaccaataatagttttgataatcacccataattttgtgtttaaacattgaaattatagtacagacagtattctctgtgttctgtgaatttcagcagcttcagaatagagtttaatttagaaatttgcagtgaaaaaagctatctctttgttcacaaccataaatcaggagatggagattaattctattggctcttagtcacttggaactgattaattctgactttctgtcactaagcacttggtatttggccatctccattctgagcaccaaacggttaacacgaatgtccactagaactctgctgtgtgtcacccttaaatcagtctaaatcttccagacaaaagcaaatggcatttatggatttaagtcattagattttcaactgacattaattaatccctcttgattgattatatcatcaagtatttatatcttaaataggaggtaggatttctgtgttaagactcttatttgtaccctataattaaagtaaaatgttttttatgagtatcccttgttttcccttcttaaattgttatcaaacaatttttataatgaaatctatcttggaaaattagaaagaaaaatggcaaggtatttattgttctgtttgccataatttagaactcacacttaagtattttgtagttttacattcctttttaacccattcagtggagaatgtcagcttttctcccaagttgtatgttaagtctattctaatatgtactcaacatcaagttataaacatgtaataaacatggaaataaagtttagctctattaaaaaaaaaaaaaanaan

SEQ ID NO: 612 - DNA, 1747 bp, Homo sapiens
  misc_feature: Incyte ID No: 349925.2
agacaaagaaggtaagggcagtgagaatgatgcatcttgcattccttgtgctgttgtgtctgccagtctgctctgcctatcctctgagtggggcagcaaaagaggaggactccaacaaggatcttgcccagcaatacctagaaaagtactacaacctcgaaaaggatgtgaaacagtttagaagaaaggacagtaatctcattgttaaaaaaatccaaggaatgcagaagttccttgggttggaggtgacagggaagctagacactgacactctggaggtgatgcgcaagcccaggtgtggagttcctgacgttggtcacttcagctcctttcctggcatgccgaagtggaggaaaacccaccttacatacaggattgtgaattatacaccagatttgccaagagatgctgttgattctgccattgagaaagctctgaaagtctgggaagaggtgactccactcacattctccaggctgtatgaaggagaggctgatataatgatctcttttgcagttaaagaacatggagacttttactcttttgatggcccaggacacagtttggctcatgcctacccacctggacctgggctttatggagatattcactttgatgatgatgaaaaatggacagaagatgcatcaggcaccaatttattcctcgttgctgctcatgaacttggccactccctggggctctttcactcagccaacactgaagctttgatgtacccactctacaactcattcacagagctcgcccagttccgcctttcgcaagatgatgtgaatggcattcagtctctctacggacctccccctgcctctactgaggaacccctggtgcccacaaaatctgttccttcgggatctgagatgccagccaagtgtgatcctgctttgtccttcgatgccatcagcactctgaggggagaatatctgttctttaaagacagatatttttggcgaagatcccactggaaccctgaacctgaatttcatttgatttctgcattttggccctctcttccatcatatttggatgctgcatatgaagttaacagcagggacaccgtttttatttttaaaggaaatgagttctgggccatcagaggaaatgaggtacaagcaggttatccaagaggcatccataccctgggttttcctccaaccataaggaaaattgatgcagctgtttctgacaaggaaaagaagaaaacatacttctttgcagcggacaaatactggagatttgatgaaaatagccagtccatggagcaaggcttccctagactaatagctgatgactttccaggagttgagcctaaggttgatgctgtattacaggcatttggatttttctacttcttcagtggatcatcacagtttgagtttgaccccaatgccaggatggtgacacacatattaaagagtaacagctggttacattgctaggcgagatagggggaagacagatatgggtgtttttaataaatctaataattattcatctaatgtattatgagccaaaatggttaatttttcctgcatgttctgtgactgaagaagatgagccttgcagatatctgcatgtgtcatgaagaatgtttctggaattcttcacttgcttttgaattgcactgaacagaattaagaaatactcatgtgcaataggtgagagaatgtattttcatagatgtgttattacttcctcaataaaaagttttattttgggcctgttcctt

SEQ ID NO: 613 - DNA, 2555 bp, Homo sapiens
  misc_feature: Incyte ID No: 1003386CB1
cccccctccactccacagaaaaccctcccctccctgctgtgcatgacgcgggctccctctgcacacagtgcacgaagacgctgtcgggagagcccaggattcaacacgggccttgagaaatgtggctcttgtacctcctggtgccggccctgttctgcagggcaggaggctccattcccatccctcagaagttatttggggaggtgacttcccctctgttccccaagccttaccccaacaactttgaaacaaccactgtgatcacagtccccacgggatacagggtgaagctcgtcttccagcagtttgacctggagccttctgaaggctgcttctatgattatgtcaagatctctgctgataagaaaagcctggggaggttctgtgggcaactgggttctccactgggcaaccccccgggaaagaaggaatttatgtcccaagggaacaagatgctgctgaccttccacacagacttctccaacgaggagaatgggaccatcatgttctacaagggcttcctggcctactaccaagctgtggaccttgatgaatgtgcttcccggagcaaatcaggggaggaggatccccagccccagtgccagcacctgtgtcacaactacgttggaggctacttctgttcctgccgtccaggctatgagcttcaggaagacaggcattcctgccaggctgagtgcagcagcgagctgtacacggaggcatcaggctacatctccagcctggagtaccctcggtcctacccccctgacctgcgctgcaactacagcatccgggtggagcggggcctcaccctgcacctcaagttcctggagccttttgatattgatgaccaccagcaagtacactgcccctatgaccagctacagatctatgccaacgggaagaacattggcgagttctgtgggaagcaaaggccccccgacctcgacaccagcagcaatgctgtggatctgctgttcttcacagatgagtcgggggacagccggggctggaagctgcgctacaccaccgagatcatcaagtgcccccagcccaagaccctagacgagttcaccatcatccagaacctgcagcctcagtaccagttccgtgactacttcattgctacctgcaagcaaggctaccagctcatagaggggaaccaggtgctgcattccttcacagctgtctgccaggatgatggcacgtggcatcgtgccatgcccagatgcaagatcaaggactgtgggcagccccgaaacctgcctaatggtgacttccgttacaccaccacaatgggagtgaacacctacaaggcccgtatccagtactactgccatgagccatattacaagatgcagaccagagctggcagcagggagtctgagcaaggggtgtacacctgcacagcacagggcatttggaagaatgaacagaagggagagaagattcctcggtgcttgccagtgtgtgggaagcccgtgaaccccgtggaacagaggcagcgcatcatcggagggcaaaaagccaagatgggcaacttcccctggcaggtgttcaccaacatccacgggcgcgggggcggggccctgctgggcgaccgctggatcctcacagctgcccacaccctgtatcccaaggaacacgaagcgcaaagcaacgcctctttggatgtgttcctgggccacacaaatgtggaagagctcatgaagctaggaaatcaccccatccgcagggtcagcgtccacccggactaccgtcaggatgagtcctacaattttgagggggacatcgccctgctggagctggaaaatagtgtcaccctgggtcccaacctcctccccatctgcctccctgacaacgataccttctacgacctgggcttgatgggctatgtcagtggcttcggggtcatggaggagaagattgctcatgacctcaggtttgtccgtctgcccgtagctaatccacaggcctgtgagaactggctccggggaaagaataggatggatgtgttctctcaaaacatgttctgtgctggacacccatctctaaagcaggacgcctgccagggggatagtgggggcgtttttgcagtaagggacccgaacactgatcgctgggtggccacgggcatcgtgtcctggggcatcgggtgcagcaggggctatggcttctacaccaaagtgctcaactacgtggactggatcaagaaagagatggaggaggaggactgagcccagaattcactaggttcgaatccagagagcagtgtggaaaaaaaaaacaaaaaacaactgaccagttgttgataaccactaagagtctctattaaaattactgatgcagaaagaccgtgtgtgaaattctctttcctgtagtcccattgatgtactttacctgaaacaacccaaagggcccctttctttcttctgaggattgcagaggatatagttatcaatctctagttgtcactttcctcttccactttgataccattgggtcattgaatataactttttccaaataaagttttatgagaaatgccagtgtgc

SEQ ID NO: 614 - DNA, 1793 bp, Homo sapiens
  misc_feature: Incyte ID No: 481231.23
ggaggtgtgtcctgctgcctgccccggtcactctggctccccagctcaaggttcaggccttgccccaggccgggcctctgggtacctgaggtcttctcccgctctgtgcccttctcctcacctggctgcaatgagtgggggagcacggggcttctgcatgctgaaggcaccccactcagccaggcccttcttctcctcaaggtcccccacggcccttcaggatgaaagctgcggtgctgaccttggccgtgctcttcctgacggggagccaggctcggcatttctggcagcaagatgaacccccccagagcccctgggatcgagtgaaggacctggccactgtgtacgtggatgtgctcaaagacagcggcagagactatgtgtcccagtttgaaggctccgccttgggaaaacagctaaacctaaagctccttgacaactgggacagcgtgacctccaccttcagcaagctgcgcgaacagctcggccctgtgacccaggagttctgggataacctggaaaaggagacagagggcctgaggcaggagatgagcaaggatctggaggaggtgaaggccaaggtgcagccctacctggacgacttccagaagaagtggcaggaggagatggagctctaccgccagaaggtggagccgctgcgcgcagagctccaagagggcgcgcgccagaagctgcacgagctgcaagagaagctgagcccactgggcgaggagatgcgcgaccgcgcgcgcgccccatgtggacgcgctgcgcacgcatctggccccctacagcgacgagctgcgccagcgcttggccgcgcgccttgaggctctcaaggagaacggcggcgccagactggccgagtaccacgccaaggccaccgagcatctgagcacgctcagcgagaaggccaagcccgcgctcgaggacctccgccaaggcctgctgcccgtgctggagagcttcaaggtcagcttcctgagcgctctcgaggagtacactaagaagctcaacacccagtgaggcgcccgccgccgccccccttcccggtgctcagatgctcggtggccttggcgtggtactcggccagtctggcgccgccgttctccttgagagcctcaaggcgcgcggccaagcgctggcgcagctcgtcgctgtagggggccagatgcgtgcgcagcgcgtccacatgggcgcgcgcgcggtcgcgcatctcctcgcccagtgggctcagcttctcttgcagctcgtgcagcttctggcgcgcgccctcttggagctctgcgcgcagcggctccaccttctggcggtagagctccatctcctcctgccacttcttctggaagtcgtccaggtagggctgcaccttggccttcacctcctccagatccttgctcatctcctgcctcaggccctctgtctccttttccaggttatcccagaactcctgggtcacagggccgagctgttcgcgcagcttgctgaaggtggaggtcacgctgtcccagttgtcaaggagctttaggccgtcaggaagagcacggccaaggtcagcaccgcagctttcatcctgaagggccgtgggggacctggaggagaagaagggcctggctgagtggggtgccttcagcatgcagaagccccgtgctcccccactcattgcagccaggtgaggagaagggcacagagcgggagaagacctcaggtacccagaggcccggcctggggcaaggcctgaaccttgagctggggagccagagtgaccggggcaggcagcaggacgcacctcc

SEQ ID NO: 615 - DNA, 2526 bp, Homo sapiens
  misc_feature: Incyte ID No: 208733.5
ggcccagacgccaaggttgcgggtcatggagtcccgaaccctcctcctgctgttctcgggagccgtggccctgatccagacctgggcagattacaattacaatcaaggcagaaatgatctcatttttacattacaactctggaaaaggcaatagactgagatgcaagtgtgcccccaagtgatgggcagaaggagagaaggtgttttggatgcattctagaacacaggtaatctaaggagagttgatcaaggccgtggaagagtcctccagccactattggccatcaaaggagtcctctgtgtcccaggaatggtcctgctttggtgtccctggtgtgacccatcacccgctgggaacagcctgagagaagtagggcctctgcaccaatgctgctgaggatgtcagagcacaggaacgaggccttgggaaattacctggaaatgcgactgaaatcttccttcctgaggggtctgggctcttggaaatcaaaccctctcaggttgggtggctggacgattctcctcacacttacaatgggacaaggggaaccaggaggcccccaaggggatccctgggttccacacgaactcctcctaccctcattgtgtgacagcagccatgcctcctcctggggatcaggatctattacctgtgcctggagaggaggggactcctcttctcacccgctggtctctggacacatactgtccaattcccctgtggcagctgtaatgtgtagttcaatgggcactcatttgtccccttttaagggtaccctcctttagaatccaggaccttctaccctgcagagtgtggttttgggagagaagtgcaaaatcccacgacaggtgagttgaaggaatgggatatggagccacatccacttccaccccttggtatctggacccacgtgttcttcctactgagattacagaactgtagagatgtctttgatttttaaaatgcaccatgtcctgaaagatggcaccctcccacccgcagagtgcttcctgcaagctggcgttgagctgtgcctatagaagctcttttcaacattctttatggccagcagcccttggttggtgcagatggtgataggaccagtgggtcccacagcatggccacactgcacctccttcgctgtcaagtgggtcccccacgaagatactgcacggagagcagtgccaagcctgtggatcaggaatatcaacagcccccagagagtggtgctggctgagggtctgagagcaggacaggaaaacccacctatggaataggtgcctatccctgtgaagatgaacctctggcccttccaggatggaaggagtgcaatgtagtcaactcctcacttagggtctggttggtcacctaaagaaatagagccctaccagggaagatcattgggttcaaatgctgatgagtaggacatttagaggtggcagtgtctggatctaccttggtaggagggagtcagtactgttggacccataggtagcctcatccctgccactgtgtttgctccatttatgtacccatcctacccggcctgggctgacccatggggaaggctggctaatttcagtgcttctgcttggttgttcagggccatttcaggtttgggtgttttctggggatgttaacatgggattcaggctcaactcacaagaaacttttccatctcatgatggatgctgttgggcatgtccaatgtatgacttcatgagttacacagatgctaattcgtaggggcacttggaatcacatggttgttttgtgtcccatggtcaagcattctatcttatcagggcctacagtaacatgccaaaagttgcttccaacatatttctctgctttggatggggcatatttctgtgctgtggatgacatggccttactccagaatcccaggccctccactgtgactctcctactggtgcttggttcagctccaccccaaatcttaccccaccactggcactttcagcaccagggggtctgaaggatggtgactgcgccatggcctggatctgctgcagtgtcctttcctgtggaggctccactcaaagctggcatcctcctatgtcacctagagtgtgggtcaaagcaatacacctacatgtagaatgtgatgtcagaactcaaacaggctcaccaggcagtgtgcttccttccttgcatgaggatgcaagatgcaacagtttgtctttcacattggaagggacacccctggatgcccctaaccactagacctgtaaaacttcactgcagtggccacttctgaatctctgtaaggtttatttatcttcaccctctggagagaagatgttttaccaaagcctctagtgtaccttcctcctcttactcatccatcccagtcaacatgatgttgtcaatgaaataaaggaatttaatattctatagtatatccaggttctccagatctcttaagactgtactatagaggcctggggaattataatagccctgaggcaaactatgaattaaagtgttgtggatcccacatg

SEQ ID NO: 616 - DNA, 2133 bp, Homo sapiens
  misc_feature: Incyte ID No: 200109.1
accccttgttctaactgtcgtttgggaagatttgagagtctaagcaacctcgtttatgtcttatctttgcattttcctgtattcagctattttcttaaaggaaggcccaggtctgtattatcctactgccacataggaagtaaaatgagtactcacagccttgcgcctaatcactgaacacagcttttagtaatgttttacacaagaacaggatattggcaactcaactgttaagcctttctgtgattattcttccttgagatcactctgatgtcaccagtgtaatttgagcctggagcttttgttcacactttaaatagcagtcccagaatgatttcactacagactctctggaaagcctgggagctgaattccggaagatccccacatcgatgaaagcaaagcgaagccaccaagccatcatcatgtccacgtcgctacgagtcagcccatccatccatgggctaccacttcgacacagcctctcgtaagaaagccgtgggcaacatctttgaaaacacagaccaagaatcactagaaaggctcttcagaaactctggagacaagaaagcagaggagagagccaagatcatttttgccatagatcaagatgtggaggagaaaacgcgtgccctgatggccttgaagaagaggacaaaagacaagcttttccagtttctgaaactgcggaaatattccatcaaagttcactgaagagaagaggatggataaggacgttatccaagaatggacattcaaagaccaagtgagtttgtgagattctaacagatgcagcattttgctgctaccttacaagcttctcttctgtcaggactccagaggctggaaagggaccgggactggaaagggaccaggactgaacagactggttacaaagactccaaacaatttcatgccctgtgctgttacagaggagaacaaaatgctttcagcaaggatttgaaaactcttccgtccctgcaggaaaggattgatgctgatagaagagcctggacagatgtaatgagaactaaagaaaacagatggctggagatgacatttatccagggtcactttgtcaggccctaggacttaaatcgaagttgaactttttttttttttttaaccaaatagataggggaagggaggagggagagggaggacagggagagaaaataccatgcataaattgtttactgaatttttatatctgagtgttcaaaatatttccaagcctgagtattgtctattggtatagatttttagaaatcaataattgattatttatttgcacttattacaatgcctgaaaaagtgcaccacatggatgttaagtagaaattcaagaaagtaagatgtcttcagcaactcagtaaaaccttacgccaccttttggtttgtaaaaggttttttatacatttcaaacaggttgcacaaaagttaaaataatggggtcttttataaatccaaagtactgtgaaaacattttacatattttttaaatcttctgactaatgctaaaacgtaatctaattaaatttcatacagttactgcagtaagcattaggaagtgaatatgatatacaaaatagtttataaagactctatagtttctataatttattttactggcaaatgtcatgcaacaataataaattattgtaaactttgtggcttttggtctgtgatgcttggtctcaaaggaaaaaataagatggtaaatgttgatatttacaaacttttctaaagatgtgtctctaacaataaaagttaattttagagtagttttatattaattaccaaactttttcaaaacaaattcttacgtcaaatatctgggaagtttctctgtcccaatcttaaaatataaaatatagatatagaagttcatagattgactccttggcatttctatttatgtatccattaaggatgagttttaaaaggctttctcttcatacttttgaaaaatttcttctatgattacagtagctatgtacatgtgtacatctatttttcccaagcaatatgttttgggtttagagtctgagtgatgaccaagattctgtgtgttactactgtttgtttaataggaacaaatatagaaataatattatctctttgcttatttcc

SEQ ID NO: 617 - DNA, 2108 bp, Homo sapiens
  misc_feature: Incyte ID No: 3127618CB1
gaggaggcgccgagctgaccgggcgacgccgcgggaggttctggaaacgccgggagctgcgagtgtccagacacttccctctgtgaccatgaaactctgggtgtctgcattgctgatggcctggtttggtgtcctgagctgtgtgcaggccgaattcttcacctctattgggcacatgactgacctgatttatgcagagaaagagctggtgcagtctctgaaagagtacatccttgtggaggaagccaagctttccaagattaagagctgggccaacaaaatggaagccttgactagcaagtcagctgctgatgctgagggctacctggctcaccctgtgaatgcctacaaactggtgaagcggctaaacacagactggcctgcgctggaggaccttgtcctgcaggactcagctgcaggttttatcgccaacctctctgtgcagcggcagttcttccccactgatgaggacgagataggagctgccaaagccctgatgagacttcaggacacatacaggctggacccaggcacaatttccagaggggaacttccaggaaccaagtaccaggcaatgctgagtgtggatgactgctttgggatgggccgctcggcctacaatgaaggggactattatcatacggtgttgtggatggagcaggtgctaaagcagcttgatgccggggaggaggccaccacaaccaagtcacaggtgctggactacctcagctatgctgtcttccagttgggtgatctgcaccgtgccctggagctcacccgccgcctgctctcccttgacccaagccacgaacgagctggagggaatctgcggtactttgagcagttattggaggaagagagagaaaaaacgttaacaaatcagacagaagctgagctagcaaccccagaaggcatctatgagaggcctgtggactacctgcctgagagggatgtttacgagagcctctgtcgtggggagggtgtcaaactgacaccccgtagacagaagaggcttttctgtaggtaccaccatggcaacagggccccacagctgctcattgcccccttcaaagaggaggacgagtgggacagcccgcacatcgtcaggtactacgatgtcatgtctgatgaggaaatcgagaggatcaaggagatcgcaaaacctaaacttgcacgagccaccgttcgtgatcccaagacaggagtcctcactgtcgccagctaccgggtttccaaaagctcctggctagaggaagatgatgaccctgttgtggcccgagtaaatcgtcggatgcagcatatcacagggttaacagtaaagactgcagaattgttacaggttgcaaattatggagtgggaggacagtatgaaccgcacttcgacttctctaggaatgatgagcgagatactttcaagcatttagggacggggaatcgtgtggctactttcttaaactacatgagtgatgtagaagctggtggtgccaccgtcttccctgatctgggggctgcaatttggcctaagaagggtacagctgtgttctggtacaacctcttgcggagcggggaaggtgactaccgaacaagacatgctgcctgccctgtgcttgtgggctgcaagtgggtctccaataagtggttccatgaacgaggacaggagttcttgagaccttgtggatcaacagaagttgactgacatccttttctgtccttccccttcctggtccttcagcccatgtcaacgtgacagacacctttgtatgttcctttgtatgttcctatcaggctgatttttggagaaatgaatgtttgtctggagcagagggagaccatactagggcgactcctgtgtgactgaagtcccagcccttccattcagcctgtgccatccctggccccaaggctaggatcaaagtggctgcagcagagttagctgtctagcgcctagcaaggtgcctttgtacctcaggtgttttaggtgtgagatgtttcagtgaaccaaagttctgataccttgtttacatgtttgtttttatggcatttctatctattgtggctttaccaaaaaataaaatgtccctaccagaagccttaaaaaaaaaaaaaaa

SEQ ID NO: 618 - DNA, 995 bp, Homo sapiens
  misc_feature: Incyte ID No: 003514CB1
ccggcagcccctggactgtgacccagccagcaccgcctctcctagtggcaactggctgggaatggctgaggggctacctactgcttgcggcctgccagcgggacccggggggcggaaagaagaaagggggcggggttgaggggggcgggcctggacctggggagtgaaagcgaaagcccgggcgactagccgggagaccagagatctagcgactgaagcagcatggccaagccgtgtggggtgcgcctgagcggggaagcccgcaaacaggtggaggtcttcaggcagaatcttttccaggaggctgagggattcctctacagattcttgccacagaaaatcatatacctgaatcagctcttgcaagaggactccctcaatgtggctgacttgacttccctccgggccccactggacatccccatcccagaccctccacccaaggatgatgagatggaaacagataagcaggagaagaaagaagtccctaagtgtggatttctccctgggaatgagaaagtcctgtccctgcttgccctggttaagccagaagtctggactctcaaagagaaatgcattctggtgattacatggatccaacacctgatccccaagattgaagatggaaatgattttggggtagcaatccaggagaaggtgctggagagggtgaatgccgtcaagaccaaagtggaagctttccagacaaccatttccaagtacttctcagaacgtggggatgctgtggccaaggcctccaaggagactcatgtaatggattaccgggccttggtgcatgagcgagatgaggcagcctatggggagctcagggccatggtgctggacctgagggccttctatgctgagctttatcatatcatcagcagcaacctggagaaaattgtcaacccaaagggtgaagaaaagccatctatgtactgaacccgggactagaaggaaaataaatgatctatatgttgtgtggaaaaaaaaaa

SEQ ID NO: 619 - DNA, 1001 bp, Homo sapiens
  misc_feature: Incyte ID No: 1500561CB1
gcgaaagcaggaagtacagacgtgaagcctagcagaggactttttagctgctcactggccccgcttgtctggccgactcatccgcccgcgacccctaatcccctctgcctgccccaagatgctgaagccagccctggagccccgagggggcttctccttcgagaactgccaaagaaatgcatcattggaacgcgtcctcccggggctcaaggtccctcacgcacgcaagaccgggaccaccatcgcgggcctggtgttccaagacggggtcattctgggcgccgatacgcgagccactaacgattcggtcgtggcggacaagagctgcgagaagatccacttcatcgcccccaaaatctactgctgtggggctggagtagccgcggacgccgagatgaccacacggatggtggcgtccaagatggagctacacgcgctatctacgggccgcgagccccgcgtggccacggtcactcgcatcctgcgccagacgctcttcaggtaccagggccacgtgggtgcatcgctgatcgtgggcggcgtagacctgactggaccgcagctctacggtgtgcatccccatggctcctacagccgtctgcccttcacagccctgggctctggtcaggacgcggccctggcggtgctagaagaccggttccagccgaacatgacgctggaggctgctcaggggctgctggtggaagccgtcaccgccgggatcttgggtgacctgggctccgggggcaatgtggacgcatgtgtgatcacaaagactggcgccaagctgctgcggacactgagctcacccacagagcccgtgaagaggtctggccgctaccactttgtgcctggaaccacagctgtcctgacccagacagtgaagccactaaccctggagctagtggaggaaactgtgcaggctatggaggtggagtaagctgaggcttagagcttggaacaagggggaataaacccagaaaatacagttaaaaaaaaaa

SEQ ID NO: 620 - DNA, 4125 bp, Homo sapiens
  misc_feature: Incyte ID No: 347941.18
  unsure 3891, 3894, 3896-3897, 3905, 3908, 3915, 4019, 4035-4037, 4067, 4083: a, t, c, g, or other
ccccgtcgcagctccgcggagcctcggtgtctcctgcaacagggggcggggggaacagcggcgagcagccctgggctgcggcttcctccccacgcccgagtctcctgcgcaccgccgccgaggacgcgcgcccgagcctagtccccacgccgcggcgcgcccgggctccctgctgatcccagaacaatcaaccatgacgaccgaatctggatcagactcggaatccaagccggaccaggaggccgagccccaggaggcggcgggggcgcaggggcgcgcgggggcgcccgtgccggagccgcccaaggaggagcagcagcaggccctggagcagttcgccgccgctgcagcgcacagcaccccggtgcggagggaggtcactgacaaggaacaggagtttgctgccagggctgcaaaacagctcgaatatcagcaattagaagacgataaactttctcagaaatcatctagcagtaaactctctcggtctccattaaagattgtcaaaaagcctaaaagcatgcagtgcaaagtgatacttctcgatggatcagaatatacctgtgatgtagagaaacgctccagaggacaagtgctgtttgataaagtgtgtgaacacttgaacttgctagagaaagactactttgggcttacgtatcgagatgctgaaaaccagaagaattggttggaccctgctaaggaaataaaaaacaggttcgaagtggtgcttggcacttttcatttaatgtgaaattttatccaccagaccctgcccaatatctgaagatatcaccaggtactacctctgcttgcagttgcgagatgacatcgtgtccggaaggctgccctgctcctttgttaccctggccttgctgggctcctacactgtccagtcagagctcggagactatgacccagatgaatgtgggagcgattacattagtgagttccgctttgcaccaaaccacactaaagaactggaagacaaagtgatcgagctgcacaagagccacagaggaatgacgccagcagaagcagagatgcatttcttggaaaatgccaaaaaattatcaatgtatggggtagatttacatcatgctaaggactcagaaggggtagaaattatgttaggagtttgtgcaagtggtctgttgatatatcgcgaccggctgcgaataaacagatttgcctggcccaaggttctaaagatttcatacaaacggaacaacttttacattaagatccggccgggagagtttgaacaatttgaaagcaccattgggtttaagctgccaaaccatcgagctgccaagcgtttatggaaagtatgtgttgagcatcatacatttttcagactactgttaccagaagcacctcccaagaaattcctaaccttgggttccaagtttcgttatagtggcaggacacaagcgcaaacgagaagagccagtgcgttgatagatcgcccagcaccttactttgaacgctcatccagcaaacgttataccatgtctcgcagcttggatggagcatcagtgaatgaaaaccatgaaatatacatgaaggattctatgtctgctgcagaggttggtactggccagtacgccacaacaaaaggcatctctcagaccaacttgatcaccactgtgactccggagaagaaggctgaggaggagcgggacgaggaagaggacaaacggaggaagggggaagaagtcacgcccatctcggccatccggcacgagggaaagactgacagtgagcgcacggacaccgcagccgacggggagaccaccgccactgaggagctagaaaaaactcaagatgacctgatgaaacatcaaaccaacattagcgagctgaaaagaaccttcttagaaacctcaacagacactgccgtaacgaatgaatgggagaagaggctttccacctcccccgtgcgactggccgccaggcaggaggatgcccccatgatcgaaccacttgtccctgaagagaaaatggaaaccaagacggagtccagtggaatagagacggaacccaccgtgcaccacctgccgcttagcactgagaaggtggtgcaggagaccgtgttggtggaggagcggcgtgtggtgcacgcgagtggggatgcttcttactcggcgggagacagcggggatgctgcagcacagcccgcattcacaggcattaaagggaaagagggctctgccttgacggagggggctaaagaggaaggaggggaggaggtcgctaaagctgtcctggaacaggaagagacagccgctgcttcccgtgagcgacaagaggagcagagtgcagccatccacatttcagaaactttggaacaaaaacctcattttgagtcctcaacggtgaagacggaaaccatcagttttggcagtgtttcaccgggaggagtaaagctagaaatttccacgaaggaagtgccagtagttcacaccgaaaccaaaaccatcacatatgaatcatcacaggtcgatccaggcacagatctggagccaggcgtgctgatgagtgcacagacgatcacatctgaaaccaccagtaccaccaccactacgcacatcaccaaaactgtgaaagggggcatttcagagacaagaattgagaagcgaatagtcatcacgggggatgcagacattgaccatgaccaggcgctggctcaggcaattaaagaggccaaagagcagcaccctgacatgtcagtgaccaaagtagtggtccataaagagacagagatcacaccagaagatggagaggattgaccagaggaataacttagcttgcacatgaatgcagtcatgcaaaccgttaggaaaaccagagcctatatggagttccctcttctaacccaactgacttgtatctgtccgtggaaaatttcagtccagaagaattgaccttgaccattaataaagacactggcagagagatcttcccataataaagcaatctgattcagcatcactaaaccgataatgcatgaagcaacgataaaattacaaaagagcagcatttttaattttcacaaaatgtctcagttttcagctatacctgcacgttcataaccaacaatataaaccgtggtctcatgtaacacataaacaattcatgcctttcatagtttattattattaaagtctaaacaaaattgcaatttcttaggtaaccttatatttacaataaatgaagattaccctcaaatgctagaagctgtctaggtccgtccggtgtgtcagattttcctcagattagatgtgccaataaccaagtttattcagtaaacaacttgtacttgtttcatctggttttattactctcacccataaacagtaatgactctctgaccctctggaaatatgtaatgcttccaatcttgctttgtgtatctcatttaatttgttataaggtagtactgattttagcatattaatgcgatttcttccttgttgtttgctttggtctgtgttcaatccagagagcttaaattgtcattattttgggaagaaaacctgtatttttgttagtttacaatattatgaaatttcacttcaggagaaactgctgggcttcctgtggctttgttttcttagttactttttccgtgccgtgtattttttaattgatttttcttcttttacttgaaaagaaagtgttttattttcaaatctggtccatatttacattctagttcagagccaagccttaaactgtacagaatttccactgtaattaaaactatttagtgttagttataaatagccttcaaaaagagagattctccattacacgatcacctgcatcacagcccatggtgaatgtatgtttctgcatagcgaaataaaaatggcaaatgcactgaaagcnctncnnaaaaagcnagnaagtgangaactgaggatttgaacccaagtttgtcaccaaggagctttccagggcacatgtcataaaattagagccaactgcagagctgtaagggaacttttagagatgancttcttcagcctccannntttacagaaggaaactgaatcccagaaggngaaattgcctttctcnaggctccctggatgggtaataacacagatatgagtaggtcac

SEQ ID NO: 621 - DNA, 1425 bp, Homo sapiens
  misc_feature: Incyte ID No: 1099873.4
  unsure 606: a, t, c, g, or other
aaagcatcgtaatcagctgcgtcgccttttggtgacgccagatagtgcgcgtcacagtttattagagagctctgtagccagcctcttctgcgcacccacctgctgcatcttagttcagtcggctcttagagtagtaaccgccagaaaggagtcggaagaggtctcacgaggctgtcatcaccgccatgcccaagaataaaggtaaaggaggtaaaaacaggcgcaggggtaaaaatgagaatgaatctgaaaaaagagagttggtgtttaaagaggatggacaagagtatgctcaggtaatcaaaatgttgggaaatggacgattggaagcattgtgttttgatggtgtaaagaggttatgccatatcagagggaaattgagaaaaaaggtttggataaatacatcagacattatattggttggtctacgggactatcaggataacaaagctgatgtaattttaaagtacaatgcagatgaagctagaagcctgaaggcatatggcgagcttccagaacatgctaaaatcaatgaaacagacacatttggtcctggagatgatgatgaaatccagtttgacgatattggagatgatgatgaagacntgatgatatctaaattgaaccaagtgtttttacatgacaagttctctgaggatggttctacagttgggattttggccatcatcaaccaagaagagaaattcatttagtgtgtagtttctgaaagcaaactgatttattttcattgttttaaagtatttatttctttaaaagctgaggacactgaattaccttaagttaaatgttaatactttattgttttgatgtaatggaacttaaggataaaagaccataatatttgctgttaaaataaataaacgagtgcctttcctactgtgataacgtcaagtaattggatattttgaatacatttctgcctgataatcatgctgggttctaataagccctacttccacctaatctgtttacagtcttttggtatgtttcagttacttagatggtctcataaggtttctgatacaatttgaagacagaaatctgcatttagaatcagaaaacatggacatatttttcatatttatctagtcatatgtaattttatgctaacattgatagtttataaatccttttcatcctttgtgcctcggttattaaggaaaaaaaaatgtccaacatacagtttttaaagtgtggcagttttgagtagtaacttagaatgtataagattaagagttaaagaaaccgaacaataagtggcaaccaattatcttaacattggaaatactggggtgccattttgttttcaaaagttattcattgtaatccactgttttggctttcatgaacaagtaaattacagtgtataaatgaaaagcaatttcataataaattctataaact

SEQ ID NO: 622 - DNA, 2300 bp, Homo sapiens
  misc_feature: Incyte ID No: 2161410CB1
tgtgttggctgaggaggagcgagccgggccggggggcagctgcacagtctccgggatccccaggcctggaggggggtctgtgcgcggccggctggctctgccccgcgtccggtcccgagcgggcctccctcgggccagcccgatgtgaccgagcccagcggagcctgagcaaggagcgggtccgtcgcggagccggagggcgggaggaacatgacatcgcggagatggtttcacccaaatatcactggtgtggaggcagaaaacctactgttgacaagaggagttgatggcagttttttggcaaggcctagtaaaagtaaccctggagacttcacactttccgttagaagaaatggagctgtcacccacatcaagattcagaacactggtgattactatgacctgtatggaggggagaaatttgccactttggctgagttggtccagtattacatggaacatcacgggcaattaaaagagaagaatggagatgtcattgagcttaaatatcctctgaactgtgcagatcctacctctgaaaggtggtttcatggacatctctctgggaaagaagcagagaaattattaactgaaaaaggaaaacatggtagttttcttgtacgagagagccagagccaccctggagattttgttctttctgtgcgcactggtgatgacaaaggggagagcaatgacggcaagtctaaagtgacccatgttatgattcgctgtcaggaactgaaatacgacgttggtggaggagaacggtttgattctttgacagatcttgtggaacattataagaagaatcctatggtggaaacattgggtacagtactacaactcaagcagccccttaacacgactcgtataaatgctgctgaaatagaaagcagagttcgagaactaagcaaattagctgagaccacagataaagtcaaacaaggcttttgggaagaatttgagacactacaacaacaggagtgcaaacttctctacagccgaaaagagggtcaaaggcaagaaaacaaaaacaaaaatagatataaaaacatcctgccctttgatcataccagggttgtcctacacgatggtgatcccaatgagcctgtttcagattacatcaatgcaaatatcatcatgcctgaatttgaaaccaagtgcaacaattcaaagcccaaaaagagttacattgccacacaaggctgcctgcaaaacacggtgaatgacttttggcggatggtgttccaagaaaactcccgagtgattgtcatgacaacgaaagaagtggagagaggaaagagtaaatgtgtcaaatactggcctgatgagtatgctctaaaagaatatggcgtcatgcgtgttaggaacgtcaaagaaagcgccgctcatgactatacgctaagagaacttaaactttcaaaggttggacaagggaatacggagagaacggtctggcaataccactttcggacctggccggaccacggcgtgcccagcgaccctgggggcgtgctggacttcctggaggaggtgcaccataagcaggagagcatcatggatgcagggccggtcgtggtgcactgcagtgctggaattggccggacagggacgttcattgtgattgatattcttattgacatcatcagagagaaaggtgttgactgcgatattgacgttcccaaaaccatccagatggtgcggtctcagaggtcagggatggtccagacagaagcacagtaccgatttatctatatggcggtccagcattatattgaaacactacagcgcaggattgaagaagagcagaaaaggaagaggaaagggcacgaatatacaaatattaagtatcctctagcggaccagacgagtggagatcagagccctctcccgccttgtactccaacgccaccctgtgcagaaatgagagaagacagtgctagagtctatgaaaacgtgggcctgatgcaacagcagaaaagtttcagatgagaaaacctgccaaaacttcagcacagaaatagatgtggactttcaccctctccctaaaaagatcaagaacagacgcaagaaagtttatgtgaagacagaatttggatttggaaggcttgcaatgtggttgactaccttttgataagcaaaatttgaaaccatttaaagaccactgtattttaactcaacaatacctgcttcccaattactcatttcctcagataagaagaaatcatctctacaatgtagacaacattatattttatagaatttgtttgacattgaggaagcagttaaattgtgcgctg

SEQ ID NO: 623 - DNA, 510 bp, Homo sapiens
  misc_feature: Incyte ID No: 475055.1
  unsure 414: a, t, c, g, or other
gatccaaataacttatccactttttttaaaaagaagtcttatctataaaaaccttaaaggaattttccatttacttcactggtctagtaaaattatacacacacacagacatgcacacacatatataaacattcacacacatacatatgtacaggtattgttatttgtaatttgacccttgtattttttagtttaaaatgttagtactgcaaaatgttatgtcctcaaaaacacattgtaccatgattatgccgctttcaatattgtaaagtgaggtttttgccgcattattattttttggatttcaatagcatagcttcaagttattcgtaagaattttttataaataatacatttttatacttttttataattaccatatctcatagtgaagtatataatatatatgatatnagctcaatatagtatattaattccgttaaacacaaagacatatcagtttgtagctttggtgggataaacaaattaatttagcattcatgggctatg

SEQ ID NO: 624 - DNA, 417 bp, Homo sapiens
  misc_feature: Incyte ID No: 347941.1
  unsure 355-356: a, t, c, g, or other
gcgtacactggcagtaattagtttcaggatttggctaacacaaatgccctacagtccagtgtctgattggcatgtggagagagaaacgctccagaggacaagtgctgtttgataaagtgtgtgaacacttgaacttgctagagaaagactactttgggcttacgtatcgagatgctgaaaaccagaagaattggttggaccctgctaaggaaataaaaaaacaggttcgaagtggtgcttggcacttttcatttaatgtgaaattttatccaccagaccctgcccaactatctgaagatatcaccaggactcagaaggggtagaaattatgttaggagtttgtgcaagtggtctnntgatatatcgcgaccggctgcgaataaacagatttgcctggcccaaggttctaaagatttc

SEQ ID NO: 625 - DNA, 2914 bp, Homo sapiens
  misc_feature: Incyte ID No: 238451.2
  unsure 2740, 2749: a, t, c, g, or other
gctgcctgcctccttcccctgcatttttgggccgggagagaaccaaccactttcccctgaggcctcccgcaaagccctggaggctgtggccactgaggtcaacagcttcctgaccaacgggccctgcccggcctccccgctgagcctggaggaggtggccatggggttcgtgcgcgtggccaacgaggccatgtgccggcccatccgtgcactcacgcaggcaagaggccatgacccctcagcccatgtgctggcctgctttgggggagctggtgggcagcatgcatgtgccatcgcccgggccctgggcatggacacggtgcacatccacaggcacagtgggctgctgtcggccctggggctggccctggctgacgtggtgcatgaggcacaggaaccctgctccctgctctacgcgcctgagaccttcgtgcagctggaccagaggctgagccgcctggaggagcagtgtgtggatgctctgcaggcccagggcttccccaggtcccagatcagcactgagagcttcctgcacctgcgctaccagggcacggactgtgctctgatggtgtctgcccaccagcacccagccacagcccgctcgccccgtgcgggggacttcggggcagcctttgtggagcggtacatgagggagtttggctttgtcatacctgagcggccggtggtcgtggacgatgtgcgagtgcggggcaccggccgcagtggtcttcgcctcgaggatgcccccaaagcccagaccgggcctccccgggtggacaagatgacccagtgctactttgaggggggctaccaggagacccctgtgtacctgctggcagagctgggctatgggcacaagctccatgggccctgcctcatcatcgacagtaacagcaccatcctggtggagccaggttgccaggcagaggtgaccaagacaggggacatctgcatctccgtgggggccgaagtccccggcacagtgggcccccagctggaccctatccagctgtccatcttctcacaccgcttcatgagcattgctgagcagatgggccgcatcctgcagcgcacagccatctccaccaacatcaaggagcgtctggacttctcctgtgccctctttgggcccgatggggggctggtgtccaatgccccccacatccctgtgcacctgggtgccatgcaggagacggtgcagttccagattcagcacctgggggccgatctccaccctggcgacgtgctactgagcaaccatcccagtgccgggggcagccacctgccagacctgactgttatcacaccggtgttttggccgggtcagacgcggcctgtgttctatgtggccagccgagggcaccacgcagacatcgggggcatcacaccaggctccatgcccccccactccaccatgctgcaacaggagggtgccgtctttctgtccttcaaacttgtccaggggggcgtcttccaggaggaggcggtgacggaggccctgcgggcgccaggcaaggtccccaactgcagcggaaccagaaacctgcacgacaacctgtcggacctccgtgcccaggtggcagccaaccagaagggcatccagctggtgggggagctcattgggcagtacggcctggacgtggtgcaggcctacatgggccatattcaggcaaacgctgagctggccgtgcgagacatgttgcgtgcctttggaacctcccggcaggcccggggcctgcccctggaggtgtcctcggaagaccacatggacgacggttcccccatccgcctccgtgtgcagatcagcctgagtcagggcagcgctgtgtttgacttcagcggcactgggccggaggtgtttggtaatctcaacgcaccgcgggccgtaaccctgtccgccctcatctactgcctgcgctgtctggtgggccgcgacatcccactcaaccagggctgcctggcgccagtgcgcgtggtcattccccgaggctccatcctggacccgtcgcccgaggcggcggtggtgggcggcaacgtgctcacgtcgcagcgcgtggtggatgtcatcctgggggcctttggggcctgcgccgcctcccagggctgcatgaacaacgtgaccctgggcaacgcccacatgggctactacgagacggtggcgggcggcgcgggcgcgggtcccagctggcacgggcgcacggtgtgcacagccacatgaccaacacacgcatcaccgaccctgagatcctggagagccggtacccggtcatcctgcgccgcttcgagctgcggcggggctcggggggcagaggccgcttccgaggcggcgacggcgtcacccgcgagctgctctttcgtgaggaggcgctgctgtcagtgctgaccgagcgccgcgccttccggccatacgggctccacgggggcgagcctggcgcccgcggcctaaacctgctgatccgcaaaaacggccggacggtgaatctgggcggcaagacgtcggtgaccgtgtaccccggggatgtgttctgtctccacacgcccggcggcggtggctatggggacccggaggaccccgccccaccgccggggtcgcccccgcaagcactggcctttcccgagcacggcagcgtctatgagtatcgccgggcccaggaggccgtgtgaggatcccgcaataaagatgccttaagtctcccggttctggggacgcagctacggcgcctagttcgtgctccgagtngtgtctgtncgcgccaaccgcgcgcccctcatctgtgcttgccttaggaggacactgagactcggagcttgcaggcgcactgcccggtggtccgtgaacccctccagggcggtactgaacgtcacctgctccacctcctgggggcgggagtcaggttgagggtcgtcccagtgc

SEQ ID NO: 626 - DNA, 1200 bp, Homo sapiens
  misc_feature: Incyte ID No: 994660.1
cggagtcggggcctctgcctggggccccagtgtggggcgccctgcgcccttattcaccaccccagcccccggagcccggcctgcccaggtcgtcctccagccttaggtcgccacggatctggtgggctgggtccccctctcgaccccagacgcccctaactcgcctctggctccgggagagggggctgcccttgctgggcagagggtccgaggccgggcccgggagccacgtggcttgccctgtccgcagcgccgtggggaagacatgcttgctgatcagctacacgaccaacgccttccccggagagtacatccccaccgtttttgacaactactctgccaacgtgatggtggacgggaaaccagtcaacttggggctgtgggacacagcgggtcaggaggactacgatcggctgcggccactctcctacccccaaactgtcccacctttttcccaaggacgtctttctgatctgcttctctctggtgagcccggcctccttcgagaatgttcgtgccaagtggtacccggaggtgcggcaccactgccccccacacgcccatcctcctggtgggcaccaagctggacctccgcgacgacaaggacaccattgagcggctgcgggacaagaagctggcacccatcacctacccacagggcctggccatggcccgggagattggtgggctctgtgaaatacctggagtgctcagccctgacccagcggggcctgaagacagtgtttgacgaggcgatccgcgcggtgctctgcccgcccccagtgaagaagccggggaagaagtgcaccgtcttctagagccctggcccacccgagcctgagggctggcggggagcagccctggacgtgtccgctgttgtgttgagacgtgtggtgtccctgagtcggctgtggggagcggtgggggtgggccggggggaagcatggggatgaggctgggtggcaggatcctgtcctctctgccgcctcattctggggtgtggctccagccttccctggcccccgccggaggccgggagggagcagggtctccctcagggctgcaggggcaggtgcagggaagccccaggatgggcttccctggagggggagggtgggggggattctgttccttgtgccccgaggtggggcagccccttctcgttttatacaataaacattctccacctacaaaaaaaaa

SEQ ID NO: 627 - DNA, 2081 bp, Homo sapiens
  misc_feature: Incyte ID No: 245057.5
aagtgctcagcactaagggagccagcgcacagcacagccaggaaggcgagcgagcccagccagcccagccagcccagccagcccggagggtatctgtgagataggtgctgctgtcctggggaggtagatgcagacagattaactctcaaggtcatttgattgcccgcctcagaacgatggatctgcatctcttcgactactcagagccagggaacttctcggacatcagctggccatgcaacagcagcgactgcatcgtggtggacacggtgatgtgtcccaacatgcccaacaaaagcgtcctgctctacacgctctccttcatttacattttcatcttcgtcatcggcatgattgccaactccgtggtggtctgggtgaatatccaggccaagaccacaggctatgacacgcactgctacatcttgaacctggccattgccgacctgtgggttgtcctcaccatcccagtctgggtggtcagtctcgtgcagcacaaccagtggcccatgggcgagctcacgtgcaaagtcacacacctcatcttctccatcaacctcttcggcagcattttcttcctcacgtgcatgagcgtggaccgctacctctccatcacctacttcaccaacacccccagcagcaggaagaagatggtacgccgtgtcgtctgcatcctggtgtggctgctggccttctgcgtgtctctgcctgacacctactacctgaagaccgtcacgtctgcgtccaacaatgagacctactgccggtccttctaccccgagcacagcatcaaggagtggctgatcggcatggagctggtctccgttgtcttgggctttgccgttcccttctccattatcgctgtcttctacttcctgctggccagagccatctcggcgtccagtgaccaggagaagcacagcagccggaagatcatcttctcctacgtggtggtcttccttgtctgctggctgccctaccacgtggcggtgctgctggacatcttctccatcctgcactacatccctttcacctgccggctggagcacgccctcttcacggccctgcatgtcacacagtgcctgtcgctggtgcactgctgcgtcaaccctgtcctctacagcttcatcaatcgcaactacaggtacgagctgatgaaggccttcatcttcaagtactcggccaaaacagggctcaccaagctcatcgatgcctccagagtctcagagacggagtactctgccttggagcagagcaccaaatgatctgccctggagaggctctgggacgggtttacttgtttttgaacagggtgatgggccctatggttttctagagcaaagcaaagtagcttcgggtcttgatgcttgagtagagtgaagaggggagcacgtgccccctgcatccattctctctttctcttgatgacgcagctgtcatttggctgtgcgtgctgacagttttgcaacaggcagagctgtgtcgcacagcagtgctgtgcgtcagagccagctgaggacaggcttgcctggacttctgtaagataggattttctgtgtttcctgaattttttatatggtgatttgtatttaaattttaagactttattttctcactattggtgtaccttataaatgtatttgaaagttaaatatattttaaatattgtttgggaggcatagtgctgacatatattcagagtgttgtagttttaaggttagcgtgacttcagttttgactaaggatgacactaattgttagctgttttgaaattatatatatataaatatatataaatatataaatatatgccagtcttggctgaaatgttttatttaccatagttttatatctgtgtggtgttttgtaccggcacgggatatggaacgaaaactgctttgtaatgcagtttgtgacattaatagtattgtaaagttacattttaaaataaacaaaaaactgttctggactgcaaatctgcacacacaacgaacagttgcatttcagagagttctctcaatttgtaagttatttttttttaataaagatttttgtttcctaaaaatgcaaaaaaaaaaaaa

SEQ ID NO: 628 - DNA, 2080 bp, Homo sapiens
  misc_feature: Incyte ID No: 1261879CB1
agtgctcagcactaagggagccagcgcacagcacagccaggaaggcgagcgagcccagccagcccagccagcccagccagcccggagggtatctgtgagataggtgctgctgtcctggggaggtagatgcagacagattaactctcaaggtcatttgattgcccgcctcagaacgatggatctgcatctcttcgactactcagagccagggaacttctcggacatcagctggccatgcaacagcagcgactgcatcgtggtggacacggtgatgtgtcccaacatgcccaacaaaagcgtcctgctctacacgctctccttcatttacattttcatcttcgtcatcggcatgattgccaactccgtggtggtctgggtgaatatccaggccaagaccacaggctatgacacgcactgctacatcttgaacctggccattgccgacctgtgggttgtcctcaccatcccagtctgggtggtcagtctcgtgcagcacaaccagtggcccatgggcgagctcacgtgcaaagtcacacacctcatcttctccatcaacctcttcggcagcattttcttcctcacgtgcatgagcgtggaccgctacctctccatcacctacttcaccaacacccccagcagcaggaagaagatggtacgccgtgtcgtctgcatcctggtgtggctgctggccttctgcgtgtctctgcctgacacctactacctgaagaccgtcacgtctgcgtccaacaatgagacctactgccggtccttctaccccgagcacagcatcaaggagtggctgatcggcatggagctggtctccgttgtcttgggctttgccgttcccttctccattatcgctgtcttctacttcctgctggccagagccatctcggcgtccagtgaccaggagaagcacagcagccggaagatcatcttctcctacgtggtggtcttccttgtctgctggttgccctaccacgtggcggtgctgctggacatcttctccatcctgcactacatccctttcacctgccggctggagcacgccctcttcacggccctgcatgtcacacagtgcctgtcgctggtgcactgctgcgtcaaccctgtcctctacagcttcatcaatcgcaactacaggtacgagctgatgaaggccttcatcttcaagtactcggccaaaacagggctcaccaagctcatcgatgcctccagagtctcagagacggagtactctgccttggagcagagcaccaaatgatctgccctggagaggctctgggacgggtttacttgtttttgaacagggtgatgggccctatggttttctagagcaaagcaaagtagcttcgggtcttgatgcttgagtagagtgaagaggggagcacgtgccccctgcatccattctctctttctcttgatgacgcagctgtcatttggctgtgcgtgctgacagttttgcaacaggcagagctgtgtcgcacagcagtgctgtgcgtcagagccagctgaggacaggcttgcctggacttctgtaagataggattttctgtgtttcctgaattttttatatggtgatttgtatttaaattttaagactttattttctcactattggtgtaccttataaatgtatttgaaagttaaatatattttaaatattgtttgggaggcatagtgctgacatatattcagagtgttgtagttttaaggttagcgtgacttcagttttgactaaggatgacactaattgttagctgttttgaaattatatatatataaatatatataaatatataaatatatgccagtcttggctgaaatgttttatttaccatagttttatatctgtgtggtgttttgtaccggcacgggatatggaacgaaaactgctttgtaatgcagtttgtgacattaatagtattgtaaagttacattttaaaataaacaaaaaactgttctggactgcaaatctgcacacacaacgaacagttgcatttcagagagttctctcaatttgtaagttatttttttttaataaagatttttgtttcctaaaaatgcaaaaaaaaaaaaa

SEQ ID NO: 629 - DNA, 617 bp, Homo sapiens
  misc_feature: Incyte ID No: 3860413CB1
gcccagcccaggaacgcgggcggtgcggactcagcgggccgggtgcaggcgcggactgggcctctgcgcccggcccgacctccgtctataaatagagcagccagttgcagggctccattctgctttccaactgcctgactgcttgttcgtctcactggtgtgagctccagcatcccctttgctataaacactgcttgccgcgctgcactccaccacgcctcctccaagtcccagcgaacccgcgtgcaacctgtcccgactctagccgcctcttcagctcgccatggatcccaactgctcctgcgccgccggtgactcctgcacctgcgccggctcctgcaaatgcaaagagtgcaaatgcacctcctgcaagaaaagctgctgctcctgctgccctgtgggctgtgccaagtgtgcccagggctgcatctgcaaaggggcgtcggacaagtgcagctgctgcgcctgatgctgggacagccccgctcccagatgtaaagaacgcgacttccacaaacctggattttttatgtacaaccctgaccgtgaccgtttgctatattcctttttctatgaaataatgtgaatgataataaaacagctttgacttgaaaaaa

SEQ ID NO: 630 - DNA, 232 bp, Homo sapiens
  misc_feature: Incyte ID No: 435717.3
agaaggcatattctttttgtggaactgtggagtatatggctccagaagtagttaatcgtcgaggtcatactcagagtgctgactggtggtcttttggtgtgttaatgtttgaaatgcttactggtacactccctttccaaggaaaagatcgaaaagaaacaatgactatgattcttaagtaagtactcccttaatatagatgttttgatgagattttaaaataaatgcttca

SEQ ID NO: 631 - DNA, 3258 bp, Homo sapiens
  misc_feature: Incyte ID No: 2416108CB1
  unsure 3180: a, t, c, g, or other
gcactttcgattttccctttagttattaaagttcctatgcagctccgcctcgcgtccggcctcatttcctcggaaaatccctgctttccccgctcgccacgccctcctcctacccggctttaaagctagtgaggcacagcctgcggggaacgtagctagctgcaagcagaggccggcatgaccaccgagcagcgacgcagcctgcaagccttccaggattatatccggaagaccctggaccctacctacatcctgagctacatggccccctggtttagggaggaagaggtgcagtatattcaggctgagaaaaacaacaagggcccaatggaggctgccacactttttctcaagttcctgttggagctccaggaggaaggctggttccgtggctttttggatgccctagaccatgcaggttattctggactttatgaagccattgaaagttgggatttcaaaaaaattgaaaagttggaggagtatagattacttttaaaacgtttacaaccagaatttaaaaccagaattatcccaaccgatatcatttctgatctgtctgaatgtttaattaatcaggaatgtgaagaaattctacagatttgctctactaaggggatgatggcaggtgcagagaaattggtggaatgccttctcagatcagacaaggaaaactggcccaaaactttgaaacttgctttggagaaagaaaggaacaagttcagtgaactgtggattgtagagaaaggtataaaagatgttgaaacagaagatcttgaggataagatggaaacttctgacatacagattttctaccaagaagatccagaatgccagaatcttagtgagaattcatgtccaccttcagaagtgtctgatacaaacttgtacagcccatttaaaccaagaaattaccaattagagcttgctttgcctgctatgaaaggaaaaaacacaataatatgtgctcctacaggttgtggaaaaacctttgtttcactgcttatatgtgaacatcatcttaaaaaattcccacaaggacaaaaggggaaagttgtcttttttgcgaatcagatcccagtgtatgaacagcagaaatctgtattctcaaaatactttgaaagacatgggtatagagttacaggcatttctggagcaacagctgagaatgtcccagtggaacagattgttgagaacaatgacatcatcattttaactccacagattcttgtgaacaaccttaaaaagggaacgattccatcactatccatctttactttgatgatatttgatgaatgccacaacactagtaaacaacacccgtacaatatgatcatgtttaattatctagatcagaaacttggaggatcttcaggcccactgccccaggtcattgggctgactgcctcggttggtgttggggatgccaaaaacacagatgaagccttggattatatctgcaagctgtgtgcttctcttgatgcgtcagtgatagcaacagtcaaacacaatctggaggaactggagcaagttgtttataagccccagaagtttttcaggaaagtggaatcacggattagcgacaaatttaaatacatcatagctcagctgatgagggacacagagagtctggcaaagagaatctgcaaagacctcgaaaacttatctcaaattcaaaatagggaatttggaacacagaaatatgaacaatggattgttacagttcagaaagcatgcatggtgttccagatgccagacaaagatgaagagagcaggatttgtaaagccctgtttttatacacttcacatttgcggaaatataatgatgccctcattatcagtgagcatgcacgaatgaaagatgctctggattacttgaaagacttcttcagcaatgtccgagcagcaggattcgaagagattgagcaagatcttactcagagatttgaagaaaagctgcaggaactagaaagtgtttccagggatcccagcaatgagaatcctaaacttgaagacctctgcttcatcttacaagaagagtaccacttaaacccagagacaataacaattctctttgtgaaaaccagagcacttgtggacgctttaaaaaattggattgaaggaaatcctaaactcagttttctaaaacctggcatattgactggacgtggcaaaacaaatcagaacacaggaatgaccctcccggcacagaagtgtatattggatgcattcaaagccagtggagatcacaatattctgattgccacctcagttgctgatgaaggcattgacattgcacagtgcaatcttgtcatcctttatgagtatgtgggcaatgtcatcaaaatgatccaaaccagaggcagaggaagagcaagaggtagcaagtgcttccttctgactagtaatgctggtgtaattgaaaaagaacaaataaacatgtacaaagaaaaaatgatgaatgactctattttacgccttcagacatgggacgaagcagtatttagggaaaagattctgcatatacagactcatgaaaaattcatcagagatagtcaagaaaaaccaaaacctgtacctgataaggaaaataaaaaactgctctgcagaaagtgcaaagccttggcatgttacacagctgacgtaagagtgatagaggaatgccattacactgtgcttggagatgcttttaaggaatgctttgtgagtagaccacatcccaagccaaagcagttttcaagttttgaaaaaagagcaaagatattctgtgcccgacagaactgcagccatgactggggaatccatgtgaagtacaagacatttgagattccagttataaaaattgaaagttttgtggtggaggatattgcaactggagttcagacactgtactcgaagtggaaggactttcattttgagaagataccatttgatccagcagaaatgtccaaatgatatcaggtcctcaatcttcagctacagggaatgagtaactttgagtggagaagaaacaaacatagtgggtataatcatggatcgcttgtacccctgtgaaaatatattttttaaaaatatctttagcagtttgtactatattatatatgcaaagcacaaatgagtgaatcacagcactgagtattttgtaggccaacagagctcatagtacttggtgaaaattanaaagcctcatttctagccttctttttagagtcaactgccaacaaacacacagtaatcactctgtacacactgggatag

SEQ ID NO: 632 - DNA, 1935 bp, Homo sapiens
  misc_feature: Incyte ID No: 2346805CB1
ggccgcgggcggcgggcggcggaggtgcggggcctgctcccgccggcaccatggccaagaccgtggcctatttctacgaccccgacgtgggcaacttccactacggagctggacaccctatgaagccccatcgcctggcattgacccatagcctggtcctgcattacggtctctataagaagatgatcgtcttcaagccataccaggcctcccaacatgacatgtgccgcttccactccgaggactacattgacttcctgcagagagtcagccccaccaatatgcaaggcttcaccaagagtcttaatgccttcaacgtaggcgatgactgcccagtgtttcccgggctctttgagttctgctcgcgttacacaggcgcatctctgcaaggagcaacccagctgaacaacaagatctgtgatattgccattaactgggctggtggtctgcaccatgccaagaagtttgaggcctctggcttctgctatgtcaacgacattgtgattggcatcctggagctgctcaagtaccaccctcgggtgctctacattgacattgacatccaccatggtgacggggttcaagaagctttctacctcactgaccgggtcatgacggtgtccttccacaaatacggaaattacttcttccctggcacaggtgacatgtatgaagtcggggcagagagtggccgctactactgtctgaacgtgcccctgcgggatggcattgatgaccagagttacaagcaccttttccagccggttatcaaccaggtagtggacttctaccaacccacgtgcattgtgctccagtgtggagctgactctctgggctgtgatcgattgggctgctttaacctcagcatccgagggcatggggaatgcgttgaatatgtcaagagcttcaatatccctctactcgtgctgggtggtggtggttatactgtccgaaatgttgcccgctgctggacatatgagacatcgctgctggtagaagaggccattagtgaggagcttccctatagtgaatacttcgagtactttgccccagacttcacacttcatccagatgtcagcacccgcatcgagaatcagaactcacgccagtatctggaccagatccgccagacaatctttgaaaacctgaagatgctgaaccatgcacctagtgtccagattcatgacgtgcctgcagacctcctgacctatgacaggactgatgaggctgatgcagaggagaggggtcctgaggagaactatagcaggccagaggcacccaatgagttctatgatggagaccatgacaatgacaaggaaagcgatgtggagatttaagagtggcttgggatgctgtgtcccaaggaatttcttttcacctcttggttgggctggagggaaaaggagtggctcctagagtcctgggggtcaccccagggcttttgctgactctgggaaagagtctggagaccacatttggttctcgaaccatctacctgcttttcctctctctcccaaggcctgacaatggtacctattagggatgagatacagacaaggatagctatctgggacattattggcagtgggccctggaggccagtccctagccccccttgccccttatttcttccctgcttccctcgaacccagagatttttgagggatgaacgggtagacaaggactgagattgcctctgacttcctcctcccctgggttctgacttcttcctccccttgcttccagggaagatgaagagagagagatttggaaggggctctggctccctaacacctgaatcccagatgatgggaagtatgttttcaagtgtggggaggatatgaaaatgttctgttctcacttttggctttatgtccattttaccactgtttttatccaataaactaagtcggtattttttgtaaaaaaaaaaaa

SEQ ID NO: 633 - DNA, 2048 bp, Homo sapiens
  misc_feature: Incyte ID No: 1097794.3
  unsure 934, 936: a, t, c, g, or other
ggcagctatgacctgggcaagaaacccatctacaagaaagcccccaccaatgagttctacgcgtgaagcttgcttgtgggcactggcttggactttagcggggagggaagccaggggattttgaagggtggacattagggtagggtgaggtcaacctaatactgacttgtcagtatctccagctctgattacctttgaagtgttcagaagagacattgtcttctactgttctgccaggttcttcttgagctttgggcctcagttgccctggcagaaaaatggattcaacttggcctttctgaaggcaagactgggattggatcacttcttaaacttccagttaagaatctaggtccgccctcaagcccatactgaccatgcctcatccagagctcctctgaagccagggggctaacggatgttgtgtggagtcctggctggaggtcctcccccagtggccttcctcccttcctttcacagccggtctctctgccaggaaatgggggaaggaactagaaccacctgcaccttgagatgtttctgtaaatgggtacttgtgatcacactacgggaatctctgtggtatatacctggggccattctaggctctttcaagtgacttttggaaatcaaccttttttatttgggggggaggatggggaaaagagctgagagtttatgctgaaatggatttatagaatatttgtaaatctatttttagtgtttgttcgtttttttaactgttcattcctttgtgcagagtgtatatctctgcctgggcaagagtgtggaggtgccgaggtgtcttcattctctcgcacatttccacagcacctgctaagtttgtatttaatggtttttgtttttgtttttgtttgtttcttgaaaatgagagaagagccggagagatgatttttattaatttttttttttntnttttttttttactatttatagctttagatagggcctcccttcccctcttctttctttgttctctttcattaaaccccttccccagttttttttttatactttaaaccccgctcctcatggccttggccctttctgaagctgcttcctcttataaaatagcttttgccgaaacatagtttttttttagcagatcccaaaatataatgaaggggatggtgggatatttgtgtctgtgttcttataatatattattattcttccttggttctagaaaaatagataaatatatttttttcaggaaatagtgtggtgtttccagtttgatgttgctgggtggttgagtgagtgaattttcatgtggctgggtgggtttttgcctttttctcttgccctgttcctggtgccttctgatggggctggaatagttgaggtggatggttctaccctttctgccttctgtttgggacccagctggtgttctttggtttgctttcttcaggctctagggctgtgctatccaatacagtaaccacatgcggctgtttaaagttaagccaattaaaatcacataagattaaaaattccttcctcagttgcactaaccacgtttctagaggcgtcactgtatgtagttcatggctactgtactgacagcgagagcatgtccatctgttggacagcactattctagagaactaaactggcttaacgagtcacagcctcagctgtgctgggacgacccttgtctccctgggtaggggggggggaatgggggagggctgatgaggccccagctggggcctgttgtctgggaccctccctctcctgagaggggaggcctggtggcttagcctgggcaggtcgtgtctcctcctgaccccagtggctgcggtgaggggaaccaccctcccttgctgcaccagtggccattagctcccgtcaccactgcaacccagggtcccagctggctgggtcctcttctgcccccagtgcccttccccttgggctgtgttggagtgagcacctcctctgtaggcacctctcacactgttgtctgttactgattttttttgataaaaagataataaaacctggtactttctaaaaaaaaa

SEQ ID NO: 634 - DNA, 2426 bp, Homo sapiens
  misc_feature: Incyte ID No: 2176583CB1
cgtggttccagttgggagagaaggaggaagtagggagcggggtggcagggcgggggacccgccgcggctgctgccaccgccgccaccaccgcctctgctcgtggcgtgggaaaggaggtgtgagtcccgggcgcgaccggcggcggcgccgctgcgggagggtcggcggtgggaaggcgatggcggatttagataaactcaacatcgacagcattatccaacggctgctggaagtgagagggtccaagcctggtaagaatgtccagcttcaggagaatgaaatcagaggactgtgcttaaagtctcgtgaaatctttctcagtcagcctatcctactagaacttgaagcaccactcaaaatatgtggtgacatccatggacaatactatgatttgctgcgactttttgagtacggtggtttcccaccagaaagcaactacctgtttcttggggactatgtggacaggggaaagcagtcattggagacgatctgcctcttactggcctacaaaataaaatatcctgagaatttttttcttctcagagggaaccatgaatgtgccagcatcaacagaatttatggattttatgatgaatgtaaaagaagatacaacattaaactatggaaaactttcacagactgttttaactgtttaccgatagcagccatcgtggatgagaagatattctgctgtcatggaggtttatcaccagatcttcaatctatggagcagattcggcgaattatgcgaccaactgatgtaccagatcaaggtcttctttgtgatcttttgtggtctgaccccgataaagatgtcttaggctggggtgaaaatgacagaggagtgtccttcacatttggtgcagaagtggttgcaaaatttctccataagcatgatttggatcttatatgtagagcccatcaggtggttgaagatggatatgaattttttgcaaagaggcagttggtcactctgttttctgcgcccaattattgcggagagtttgacaatgcaggtgccatgatgagtgtggatgaaacactaatgtgttcttttcagattttaaagcctgcagagaaaaagaagccaaatgccacgagacctgtaacgcctccaaggggtatgatcacaaagcaagcaaagaaatagatgtcgttttgacactgcctagtcgggacttgtaacatagagtatataaccttcatttttaagactgtaatgtgtactggtcagcttgctcagatagatctgtgtttgtgggggcccttccttccatttttgatttagtgaatggcatttgctggttataacagcaaatgaaagactcttcactccaaaaagaaaagtgttttgttttttaattctctgttccttttgcaaacaattttaatgatggtgttaaagctgtacaccccaggacagtttatcctgtctgaggagtaagtgtacaattgatcttttttaattcagtacaacccataatcatgtaaatgctcattttctttaggacataaagagagccctagggtgctctgaatctgtacatgttcttgtcataaaatgcatactgttgatacaaaccactgtgaacattttttatttgagaattttgtttcaaagggattgctttttcctctcattgtcttgttatgtacaaactagtttttatagctatcaacattaggagtaactttcaaccttgccagcatcactggtatgatgtatatttaattaaagcacacttttccccgaccgtatacttaaaatgacaaagccattcttttaaatatttgtgactctttcctaaagccaaagtttctgttgaattatgttttgacacacccctaagtacaaggtggtatggttgtatacacatgctgccttcttggggattcaaaaacaggtttttgattttgaatagcaattagtgatatagtgctgtttaagctactaacgataaaaggtaataacattttatacaatttccatatagtctattcattaagtaatctttttacagttgcatcaggcctgaacccgtccattcagaaagcttcaaattatagaaacaatactgttctatacgagtgaccgattatgctttctttggcctacattctttattctgcggtgaagttgaggcttataagttaaaacaaaggaactaacttactgtccaccagtttatacagaactcacagtacctatgacttttttaaactaagatctgttaaaaaagaaatctgtttcaacagatgaccgtgtacaataccgtgtggtgaaaatgaattcagacttattaaatgatgaacttgttaaatcttctcagtgtctatttatcagcacaatacacacaggagaactgttgatggcatattgaatagattttcctgaataaattgctctggaaaccaaaaaaaaaaa

SEQ ID NO: 635 - DNA, 1119 bp, Homo sapiens
  misc_feature: Incyte ID No: 241107.29
ggtttgcagatctgctgacttatataaagctttttgattcctactaagctttaagatttaaaaaatgttcaatgttgaaatttctgtggggctctatttttgcttggctttctggtgagagagtgaggaagcattctttccttcactaagtttgtctttcttgtcttctggatagattgattttaagagactaagggaatttacaaactaaagattttagtcatctggtggaaaaggagactttaagattgtttagggctgggcggggtgactcacatctgtaatcccagcactttgggaggccaaggcaggcagaacacttgaaggagttcaagaccagcgtggccaacgtggtgaaaccctgtctctactaaaaatacaaaaattgtttagctctgtttttcataatagaaatagaaaaggtaaaattgcttttcttctgaaaagaacaagtattgttcatccaagaagggtttttgtgactgaatcagcagtgcctgccctagtcatagctgtgcttcaaaaacctcagcatgattagtgttggagcaaaacaaggaagcaaagcaaatactgtttttgaaattctatctgttgcttgaactattttgtaataattaaactttgatgttgagaaatcacaactttattgtacacttcattgcaacttgaaattcatggtcttaaagtgagatttgaatttctattgagcgcctttaaaaaagtaataccaaaccataaagttaaaatctatgtatattgagtcatatctaaaaccacgtataaacataaattgtatttcctgttttaattccaggggaagtactgtttgggaaagctattattaggtaaatgttttacaaattactgtttctcactttcagtcataccctaatgatcccagcaagataatgtcctgtcttctaagatgtgcatcaagcctggtacatactgaaaaccctataaggtcctggataatttttgtttgattattcattgaagaaacatttattttccaattgtgtgaagtttttgactgttaataaaagaatctgtcaaccatcaaagaggtctgcattatgcttgcatgtcaaaaacattaaaaatcctataatcttc

SEQ ID NO: 636 - DNA, 430 bp, Homo sapiens
  misc_feature: Incyte ID No: 445700.1
tgcacggggcgagtagaacgtatccttctttgcgtccaaaatctggttccttgttggatttgaacagattatgtggctcgtcggggcgaaccgagggtttttatttacttggaaagaatcatcacagcccgcgaattcacaagctggatttagccattttcccttagattctgcgccatgagcctataggctgttgaatacgagagaagtgcttttctaaacgagtttctaaatttaccagcagtgtccaggaagaggcccagaacatacatattcagcaccagaaaagactggcacgcaatttttcttgacaaactgggtcttgctctttgaagggtgggtgggaatgtgctgtttttatgagaatgtcaaagaacttctcagaatcacattaagcatgctaattagccaatattaaatgctaattgtt

SEQ ID NO: 637 - DNA, 4121 bp, Homo sapiens
  misc_feature: Incyte ID No: 238125.5
  unsure 697, 702, 715: a, t, c, g, or other
cccgaggctgcagcagcgcatcccggggcatggcgcggcgggggcgcggagggctcggttcggagggggccgggagcccgggcgccctggagtgaggaggaccgggagctggctctggaggctgcggaggcgacgccggagagaacgaagcctcggctgggagcggatctttcgaagatggtttggctgccttggagatttggagatctgatgccacgatgaggactcacacacggggggctcccagtgtgtttttcatatatttgctttgctttgtgtcagcctacatcatcgacgagaacccagaagttatgattcccttcaccaatgccaactacgacagccatcccatgctgtacttctccaggcagaagtggcggagctgcagctcagggctgccagctcgcacgagcacattgcagcccgcctcacggaggctgtgcacacgatgctgtccagccccttggaatacctccctccctgggatcccaaggactacagtgcccgctggaatgaaatttttggaaacaacttgggtgccttggcaatgttctgtgtgctgtatcctgagaacattgaagcccgagacatggccaaagactacatggagaggatggcagcgcagcctagttggttggtgaaagatgctccttgggatgaggtcccgcttgctcactccctggttggttttgccacngcttntgacttcttgtanaactacctgagcaagacacaacaggagaagtttcttgaagtgattgccaatgcctcagggtatatgtatgaaacttcatacaggagaggatggggatttcaatacctgcacaatcatcagcccaccaactgtatggctttgctcacgggaagcctagtcctgatgaatcaaggatatcttcaagaagcctacttatggaccaaacaagttctgaccatcatggagaaatctctggtcttgctcagggaggtgacggatggctccctctatgaaggagttgcgtatggcagctacaccactagatcactcttccaatacatgtttctcgtccagaggcacttcaacatcaaccactttggccatccgtggcttaaacaacactttgcatttatgtatagaaccatcctgccagggtttcaaaggactgtggctattgcggactcaaattacaactggttttatggtccagaaagccaattagtgttccttgataaatttgtcatgcgtaatggcagtggtaactggctagctgaccaaatcagaaggaaccgtgtggtggaaggtccaggaacaccatccaaagggcagcgctggtgcactctgcacacagaatttctctggtatgatggcagcttgaaatcggttcctcctccagactttggcacccctacactgcattattttgaagactggggtgtcgtgacttatggaagtgcactacctgcagaaatcaatagatctttcctttccttcaagtctggaaaactggggggacgtgcaatatatgacattgtccacagaaacaaatacaaagattggatcaaaggatggagaaattttaatgcagggcatgaacatcctgatcaaaactcatttacttttgctcccaatggtgtgcctttcattactgaggctctgtacgggccaaagtacaccttcttcaacaatgttttgatgttttccccagctgtgtcaaagagctgcttttctccctgggtgggtcaggtcacagaagactgctcatcaaaatggtctaaatacaagcatgacctggcagctagttgtcaggggagggtggttgcagcagaggagaaaaatggggtggttttcatccgaggagaaggtgtgggagcttataacccccagctcaacctgaagaatgttcagaggaatctcatcctcctacatccacagctgcttctccttgtagaccaaatacacctgggagaggagagtcccttggagacagcagcgagcttcttccataatgtggatgttccttttgaggagactgtggtagatggtgtccatggggctttcatcaggcagagagatggtctctataaaatgtactggatggacgatactggctacagcgagaaagcaacctttgcctcagtgacatatcctcggggctatccctacaacgggacaaactatgtgaatgtcaccatgcacctccgaagtcccatcaccagggcagcttacctcttcatagggccatctatagatgttcagagcttcactgtccacggagactctcagcaactggatgtgttcatagccaccagcaaacatgcctacgccacatacctgtggacaggtgaggccacaggacagtctgcctttgcacaggtcattgctgatcgtcacaaaattctgtttgaccggaattcagccatcaagagcagcattgtccctgaggtgaaggactatgctgctattgtggaacagaacttgcagcattttaaaccagtgtttcagctgctggagaagcagatactgtcccgagtccggaacacagctagctttaggaagactgctgaacgcctgctgagattttcagataagagacagactgaggaggccattgacaggatttttgccatatcacagcaacagcagcagcaaagcaagtcaaagaaaaaccgaagggcaggcaaacgctataaatttgtggatgctgtccctgatatttttgcacagattgaagtcaatgagaaaaagattagacagaaagctcagattttggcacagaaagaactacccatagatgaagatgaagaaatgaaagaccttttagattttgcagatgtaacatacgagaaacataaaaatgggggcttgattaaaggccggtttggacaggcacggatggtgacaactacacacagcagggccccatcactgtctgcttcctataccaggttgttcctgattctgaacattgctattttctttgtcatgttggcaatgcaactgacttatttccagagggcccagagcctacatggccaaagatgtctttatgcagttcttctcatagatagctgtattttattatggttgtactcttcttgttcccaatcacagtgttagcactgaagctataaattacctggtcattttgtgatcacaagagtctatgcaaaaaaaaaaaatttccttaccccagattatcagatttttttccctcagattcattttaacaaattaagggaagatattttgacacaagaaagcaggaacgtggagaaattggagcaggaaaagaaattatcaaagcaatagaaatagcttggtggtcctatggtgtttttggaagtatttggcattgctaattgagcagtccatatagtactacttttagaagaaacaaaaagtctgttttttaaagtaatgttttttcttatgagaaaaaggtttagatagaattgggttttattaatattaatttaatgctattagcaatttccatatactatattgtggaaaagactgaagaatacaattctgagaaatataaaaaaattttaatggtatactcatgttgaaagataaatgttgctaagtcctggtatgatggtgtgagcttccttggggaagtacttcttgagttatgtaactaacaggatgttttactacagatctggatggctattcagataacatggcaaaaaatgatagcagaagatcattaaaaacttaaaatatattttattagaaaacatttatctatgaatgaatatttccttgatgctggtctctgcacacatatgcttggttacttgcatgcattcattggttgttcaataagtgagatgattacagataacttaatactgtattttccttatatggaaaaccgttatagacccaataacaactaaacctttcaaaagaaaatattttctattatgaatgttgattttcataccaaagaagatggagagtctaaaatttggatatgattcttatgtttttttaatagaaaaccttcttcaagtttattttcctaaataaacatcataattgtgaattttctctagtattcttcttctttgttccattatattcaaaatgcattaacattttccaaaatttttgaagagagatctttatttgg

SEQ ID NO: 638 - DNA, 3765 bp, Homo sapiens
  misc_feature: Incyte ID No: 331181.1
  unsure 2378, 3184, 3187, 3194: a, t, c, g, or other
ggtggcagcagcagcatcacacgtaacaacaacaaaaaaaaatcctcatcaaatcctcacctaagctttcagtgtatccagatccacatcttcactcaagccaggagagggaaagaggaaaggggggcaggaaaaaaaaaaaacccaacaacttagcggaaacttctcagagaatgctccaaaactcagcagtgcttctggtgctggtgatcagtgcttctgcaacccatgaggcggagcagaatgactctgtgagccccaggaaatcccgagtggcggctcaaaactcagctgaagtggttcgttgcctcaacagtgctctacaggtcggctgcggggcttttgcatgcctggaaaactccacctgtgacacagatgggatgtatgacatctgtaaatccttcttgtacagcgctgctaaatttgacactcagggaaaagcattcgtcaaagagagcttaaaatgcatcgccaacggggtcacctccaaggtcttcctcgccattcggaggtgctccactttccaaaggatgattgctgaggtgcaggaagagtgctacagcaagctgaatgtgtgcagcatcgccaagcggaaccctgaagccatcactgaggtcgtccagctgcccaatcacttctccaacagatactataacagacttgtccgaagcctgctggaatgtgatgaagacacagtcagcacaatcagagacagcctgatggagaaaattgggcctaacatggccagcctcttccacatcctgcagacagaccactgtgcccaaacacacccacgagctgacttcaacaggagacgcaccaatgagccgcagaagctgaaagtcctcctcaggaacctccgaggtgaggaggactctccctcccacatcaaacgcacatcccatgagagtgcataaccagggagaggttattcacaacctcaccaaactagtatcattttaggggtgttgacacaccagttttgagtgtactgtgcctggtttgatttttttaaagtagttcctattttctatcccccttaaagaaaattgcatgaaactaggcttctgtaatcaatatcccaacattctgcaatggcagcattcccaccaacaaaatccatgtgaccattctgcctctcctcaggagaaagtaccctcttttaccaacttcctctgccatgtttttcccctgctcccctgagaccacccccaaacacaaaacattcatgtaactctccagccattgtaatttgaagatgtggatccctttagaacggttgccccagtagagttagctgataaggaaactttatttaaatgcatgtcttaaatgctcataaagatgttaaatggaattcgtgttatgaatctgtgctggccatggacgaatatgaatgtcacatttgaattcttgatctctaatgagctagtgtcttatggtcttgatcctccaatgtctaattttctttccgacacatttaccaaattgcttgagcctggctgtccaaccagactttgagcctgcatcttcttgcatctaatgaaaaacaaaaagctaacatctttacgtactgtaactgctcagagctttaaaagtatctttaacaattgtcttaaaaccagagaatcttaaggtctaactgtggaatataaatagctgaaaactaatgtactgtacataaattccagaggactctgcttaaacaaagcagtatataataactttattgcatatagatttagttttgtaacttagctttatttttcttttcctgggaatggaataactatctcacttccagatatccacataaatgctccttgtggccttttttataactaagggggtagaagtagttttaattcaacatcaaaacttaagatgggcctgtatgagacaggaaaaaccaacaggtttatctgaaggaccccaggtaagatgttaatctcccagcccacctcaacccagaggctactcttgacttagacctatactgaaagatctctgtcacatccaactggaaattccaggaaccaaaaagagcatccctatgggcttggaccacttacagtgtgataaggcctactatacattaggaagtggcagttctttactcgtccccttttcatcggtgcctggtactctggcaaatgatgatggggtgggagactttccattaaatcaatcaggaatgagtcaatcagcctttaggtctttagtccgggggacttggggctgagagagtataaataaccctgggctgtccagccttaatagacttctcttacattttcgtcctgtagcacgctgcctgccaaagtagtcctggcagctggaccatctctgtaggatcgtaaaaaaatagaaaaaaaganaaaaaaaagaaagaaagagggaaaaagagctggtggtttgatcatttctgccatgatgtttacaagatggcgaccaccaaagtcaaacgactaacctatctatgaacaacagtagtttctcagggtcactgtccttgaacccaacagtcccttatgagcgtcactgcccaccaaaggtcaatgtcaagagaggaagagagggaggaggggtaggactgcaggggccactccaaactcgcttaggtagaaactattggtgcttgactctcactaggctaaactcaagatttgaccaaatcgagtgatagggatcctggtgggaggagagagggcacatctccagaaaaatgaaaagcaatacaactttaccataaagcctttaaaaccagtaacgtgctgctcaaggaccaagagcaattgcagcagacccagcagcagcagcagcagcacaaacattgctgcctttgtccccacacagcctctaagcgtgctgacatcagattgttaagggcatttttatactcagaactgtcccatccccaggtccccaaacttatggacactgccttagcctcttggaaatcaggtagaccatattctaagttagactcttcccctccctcccacacttcccacccccaggcaaggctgacttctctgaatcagaaaagctattaaagtttgtgtgttgtgtccattttgcaaacccaactaagccaggaccccaatgcgacaagtagttcatgagtattcctagcaaatttctctctttcttcagttcagtagatttccttttttcttttctnttnttttttntttttttggctgtgacctcttcaaaccgtggtacccccccttttctccccacgatgatatctatatatgtatctacaatacatatatctacacatacagaaagaagcagttctcacaatgttgctagttttttgcttctctttcccccaccctactccctccaattcccccttaaacttccaaagcttcgtcttgtgtttgctgcagagtgattcgggggctgacctagaccagtttgcatgattcttctcttgtgatttggttgcactttagacatttttgtgccattatatttgcattatgtatttataatttaaatgatatttaggtttttggctgagtactggaataaacagtgagcatatctggtatatgtcattatttattgttaaattacatttttaagctccatgtgcatataaaggttatgaaacatatcatggtaatgacagatgcaagttattttatttgcttatttttataattaaagatgccatagcataatatgaagcctttggtgaattccttctaagataaaaataataataaagtgttacgttttattggtttc

SEQ ID NO: 639 - DNA, 1920 bp, Homo sapiens
  misc_feature: Incyte ID No: 1327105.3
atgctctgctggacttgagctttgcctacatgccccccacctccgaggccgcctcatctctggctccgggtccccctccctttgggctagagtggcgacgccagcacctgggtaagggacatctgctcctggctgcaactcctgggctgaatggccagatgccagcagcccaagaaggggccgtggcatttgctgcttgggatgatgatgagccatggggcccatggaccggaaatgggaccttctggctgcctacagttcaaccctttcaggagggcacctatctggccaccatacacctgccatacctgcaaggacaggtcaccctggagcttgctgtgtacagtgagttgggggacagaggtctccaggggtagagggtgggcactggattgtggggaccgtaatagggggagggatgatggataagagggtgcctggggcaagtaagtagagatagaaagaggttcctgggagttagaggggtaatgggaggctagaagtttcctggaaatttgaggggctttgacatgggtatttctgtgacgcaccaatggagagacagtgggttccctatttcaggagaagaaacctaaccttctttagttctgaggaagccagcaggcaaactgagggtctcttagggaggacagtatggactgatttccctatgctcatttcgtcctctttccccagaaccccccaaagtgtccctgatgccagcaacccttgcacgggccgccccaggggaggcacccccggaattgctctgccttgtgtcccacttctacccttctgggggcctggaggtggagtgggaactccggggtggcccagggggccgctctcagaaggccgaggggcagaggtggctctcggccctgcgccaccattccgatggctctgtcagcctctctgggcacttgcagccgcccccagtcaccactgagcagcatggggcacgctatgcctgtcgaattcaccatcccagcctgcctgcctcggggcgcagcgctgaggtcaccctggaggtagcaggtaagagctgggagctctgcggaatctgagccagcacccaggaagacaggagctcactctcaccccttctgcctgccaggtctttcagggccctcccttgaggacagcgtaggccttttcctgtctgcctttcttctgcttgggctcttcaaggcactgggctgggctggtaagtgtcagccctaccctgaccatgacctgaggttggtggactttccccacctactcccaagagcctgacacccatccctctgccctccacctctaccactccagcatcccatcccttctcaatctttccccacagctgtctacctgtccacctgcaaggattcaaagaaggtacagtgctccacctctctgtatctttcccttgtcactttatctcctcatcctatctcaaaacccatggagggaggctgctggtgtggtaggcagaacctaggcttggaattcacactgatctgggttaaaacctggcactatatcctaactgtaggactctttgagcatgctacttaatctatatgtttccttgggtgtagggattttaaaaagttacttaggcagtgctgtccaatagaaagataatgcaagccacatatgtaaatttaaatactctagtactcacattaaaaaaataagcagaaacaggtaaaattaacttaataatataccttatttaatctaataattctggtcccttatctgaaatgcttgggtcagaagtgtttttggatgttggattttttcagactttggaatatttgcatatatttaatatctttgggatcagacccaaatctaaacacagaaatcatttatgtttcctatacaccttatacacatggcctgaagatttttttccttctcttttttttt

SEQ ID NO: 640 - DNA, 5072 bp, Homo sapiens
  misc_feature: Incyte ID No: 404197.20
  unsure 4213: a, t, c, g, or other
ccctgctggtcggaggatgctccgaggcccgacgctgctcccggcgggctgtcatcctcctaggggtcggccggccggcctggagccgccccgcccacggccgaggtttcgctttcccttgggagccccgccctgtgtcccggggagccggaggaggtggagatgaatggcgggcgcggcgaccgggagccggacccctgggaggtcggagcttgtcgagggatgcggctggcgctgcccggagcatggcgaccgcgtggctgagctcttctgtcgccgctgccgccgctgcgtgtgcgcgctttgcccggtgctgggcgcgcaccgtggccaccctgtgggtctggcgctggaggcagcggtgcacgtgcagaaactcagccaagaatgtttaaagcagctggcaatcaagaagcagcagcacattgacaacataacccagatagaagatgccaccgagaagctcaaggctaatgcagagtcaagtaaaacctggctgaaggggaaattcactgaactcagattactacttgacgaagaggaagcgctggccaagaaattcattgataaaaacacgcagcttaccctccaggtgtacagggaacaagctgactcttgcagagagcaacttgacatcatgaatgatctctccaacagggtctggagtatcagccaggagcccgatcctgtccagaggcttcaggcatacacggccaccgagcaggagatgcagcagcagatgagcctcggggagctgtgccatcccgtgcccctctcctttgagcccgtcaagagcttctttaagggcctcgtggaagccgtggagagtacattacagacgccattggacattcgccttaaggaaagcataaactgccagctctcagacccttccagcaccaagccaggtaccttgttgaaaaccagcccctcaccagagcgatcgctattgctgaaatacgcgcgcacgcccacgctggatcctgacacgatgcacgcgcgcctgcgcctgtccgccgatcgcctgacggtgcgctgcggcctgctgggcagcctggggcccgtgcccgtgctgcggttcgacgcgctctggcaagtgctggctcgtgactgcttcgccaccggccgccactactgggaggttgacgtgcaggaggcgggcgccggctggtgggtgggcgcggcctacgcctcccttcggcgccgcggggcctcggccgccgcccgcctgggctgcaaccgccagtcctggtgcctcaagcgctacgaccttgagtactgggccttccacgacggccagcgcagccgcctgcggccccgcgacgacctcgaccggctcggcgtcttcctggactacgaggccggcgtcctcgccttctacgacgtgacgggcggcatgagccacctgcataccttccgcgccacgttccaggagccgctctacccggccctgcggctctgggagggggccatcagcatcccccggctgccctaggggccaggaccggcgtgacagcctccaggtacgccgcagctgcccagtctcgcctaatctacctagatcagcgtggctggtccccttactgcctgcttcttagggccctctccctgccccagctttccccgaccaatcacgcctacagtgctttgaaggtttcctctcctaggctagtttcaaacaggccctaaacaagtctgctgctgccctctcatcagacctccgcaccctcaccccaccatcacttaaactactttaatccagttccttcaaagtgatacccccacaggtaagccctcagcatcctgaatacatcatccgcagcctgggaaccttctccctcgtacagcacaggaacctgacacatagtaggcacacagtaaacgtttgtgaatgaatgggagtcatccagtcctgactcttctgtctcttgaggtcccttgaatcttccgcttcctccccaccgatttcagcgtgtccacatcacagctccctccagaagctgcaagagcttcttagcagttcctggtctgaaccctctcccagtcctcatcttccaccctaaaactagagtgatcttcctaaaacttcacttaacccctcagctatgaaaaggcttccaggagtttccatgaaataacaaaaaaaaatacaagcgcctcaccttagcattcaaggcttgtctagtctgcccaaaattacttatcctcacctagctcctaccactcttcttagagactctccagtcagaaatgtgtcgcatagttccacctccacacctctctgctgccagcacattcatgcagaaaagtcttttcacctgtctcagtcttccgcaggcttacctgcgccaggaagtctaaccaaggaacaagaatctcactatcagagccacaaatctgggacctgtctttccaactaaattggaggctttggaagggcagctttgtcctatactctctccaccctgaaaagttcccagaaagccccttccctcccaagcagtgaattaataaccagcaggtgcctatcactgagtaacagaagagctgagttaggcgggcctcacaggtcacccagccagatctcatctggggagtctgaggtcctgaaagaaagcagagctgcgtaaagttaccccggggtgatataggggggccagacgtgtgccccgttcacccacccccaggcaagcatctgacctgtcccctggcccagcccttaggcccagctttcaacctgcttactcatttctcaggggattttgggaaggaatcagcaggtgacagttgctaagcaaccaaagggggtggtgtttcccaactgtcttgggacaaaaagggtaagagcacccttagatccagatgttgccaaggaaacccagagtgcccagctgtctggaatgaagtgacagaggtagaaaacagtaggccctcacaggaggccaccttcgctagcagggagtgggaggcttctttccagggatttgtgtctccgttctgaaggttctgcgtcctgttttgtcaattccctagacggttttgaagttatattctgttaaagcatcttcataggtgcttggtgggaggccaaggtcgccgaatcctcgtggtttaaatagactttcagtgcattagtttgaaccatataaaactgacaattttcaatagtttttgagttaaaaatggcacttttgatatgagacaatgtagcagaataccaggcagacagaaccttgcaaacaccttaacttctaaccaaagactttaaaactctggctggacagagttttaagcactatgctgcaggaatcctgagaaaaaggggaaattaattctattaggaatggcccaaactgaattgtgacaggcagagggtgttcctgacagagggaagatgaatacacttgaccccaacatttctgcccatccctgatgaccaagacctcttcccagacccacagctgcaggggccaagtaataacagctcttaatagtttataatgcactgttttaatgctttacgactaaactcatctgatcctttcatcagccctagagggtagaaagttttcccaattctacacatggcaaaatggagacccagagtcacttgcccaaggtcgcacagctagtggtggagctggagtctgggcccaggctgtgagttccaggtctgtgctcatggccaccaggccctactgctcagggtgaatgcagctggtctctggccagtgcctggtgctctggcccctctcgtggagctactgcccatgatgctttcctagtgcctggttactctgcgagacttgagtctacctttggactgccttccttgggggtctgagatgaggccttatggcccagaggggaacttgattcaaaaatttgggattcatgtagcagagacagagctagactgtaaaggtcacaaactagctgtgtcaaggcccgtgatagccagaaagcggcagtttcagtccatatcaattgtgtgaccagggctagtcactttttacttctcagtgccatctataaaatggggataatagcactacctaccaagtgctgtgaggctcaaatgagccaaaggttataaacttgccttaaaactatagtcctatacaaaaattagctgggcgtggtggtgcatgcctgtaatcccagctactagggaggctgaggcaagagagttgcttgaacccaggaggcgganattgcagtgagctgagattgcaccactgcactccagcctggggacagagcaagactcttgtctcaaaaaaaacaaaaaaaacatatatatactgctgtatcatgccaggatttatcagcattcccaagggagcttgcacggtactgaccgagtgctgagactactggtattcccagctgccatgtggcagcagcaggagctactagaatattctcagcacaggaatgaggcttccttggtttccatgtctgtaagggttactgatcacttaccttcttctctttcagacttgaatctgtagacatttctttattgatatggcaaattgcttgcagatatttttaaatgacagcaattttctaatatttggtttaataaaatgtgaataatgtcccttttaaccatggtcttcactgggagttcatgttgcttcaagtccctagcacccagtgatacccccacaggtaagccctcagcatcctgaatacatcatccgcagcctgggaaccttctccctcgtacagcacaggaacctgacacatagtaggcacacagtaaacatttgtgaatgaatgggagtcatccagtcctgactcttctgtctcttgaggtcccttgaatcttccgcttcctccccaccgatttcagcgtgtccacatcacagctccctccagttcatgttgcttcaagtccctagcacccagacccagaagggcctttactcatatcttattccttacgcagccttctggtagtagtcagctgctccctgattaactatctccagggatggggcattcactgcttctgaagataactcattaaagttctcacttacgtgtaaacaaccctgactccc

SEQ ID NO: 641 - DNA, 1311 bp, Homo sapiens
  misc_feature: Incyte ID No: 2588813CB1
cacgtcagccggggctagaaaaggcggcggggctgggcccagcgaggtgacagcctcgcttggacgcagagcccggcccgacgccgccatgacggccgcgctcttcagcctggacggcccggccggcggcgcgccctggcctgcggagcctgcgcccttctacgaaccgggccgggcgggcaagccgggccgcggggccgagccaggggccctaggcgagccaggcgccgccgcccccgccatgtacgacgacgagagcgccatcgacttcagcgcctacatcgactccatggccgccgtgcccaccctggagctgtgccacgacgagctcttcgccgacctcttcaacagcaatcacaaggcgggcggcgcggggcccctggagcttcttcccggcggccccgcgcgccccttgggcccgggccctgccgctccccgcctgctcaagcgcgagcccgactggggcgacggcgacgcgcccggctcgctgttgcccgcgcaggtgggcccgtgcgcacagaccgtggtgagcttggcggccgcagggcagcccaccccgcccacgtcgccggagccgccgcgcagcagccccaggcagacccccgcgcccggccccgcccgggagaagagcgccggcaagaggggcccggaccgcggcagccccgagtaccggcagcggcgcgagcgcaacaacatcgccgtgcgcaagagccgcgacaaggccaagcggcgcaaccaggagatgcagcagaagttggtggagctgtcggctgagaacgagaagctgcaccagcgcgtggagcagctcacgcgggacctggccggcctccggcagttcttcaagcagctgcccagcccgcccttcctgccggccgccgggacagcagactgccggtaacgcgcggccggggcgggagagactcagcaacgacccatacctcagacccgacggcccggagcggagcgcgccctgccctggcgcagccagagccgccgggtgcccgctgcagtttcttgggacataggagcgcaaagaagctacagcctggacttaccaccactaaactgcgagagaagctaaacgtgtttattttcccttaaattatttttgtaatggtagctttttctacatcttactcctgttgatgcagctaaggtacatttgtaaaaagaaaaaaaaccagacttttcagacaaaccctttgtattgtagataagaggaaaagactgagcatgctcacttttttatattaatttttacagtatttgtaagaataaagcagcatttgaaatcgcaaaaaaaaaaaaaaa

SEQ ID NO: 642 - DNA, 1327 bp, Homo sapiens
  misc_feature: Incyte ID No: 3551723CB1
ggagaccacaggtgcagtcagcacagcaggaccttagacaaggcacccagccccagtttccccacctgggaagggggctacttgtggctagaagcagcccggactcctgagcaagactagaccaagaggccgaaataacatctgctttgctgccgagctcagaggagaccccagacccctcccgcagccagagggctggagcctgctcagaggtgctttgaagatgccggaggccccgcctctgctgttggcagctgtgttgctgggcctggtgctgctggtggtgctgctgctgcttctgaggcactggggctggggcctgtgccttatcggctggaacgagttcatcctgcagcccatccacaacctgctcatgggtgacaccaaggagcagcgcatcctgaaccatgtgctgcagcatgcggagcccgggaacgcacagagcgtgctggaggccattgacacctactgcgagcagaaggagtgggccatgaacgtgggcgacaagaaaggcaagatcgtggacgccgtgattcaggagcaccagccctccgtgctgctggagctgggggcctactgtggctactcagctgtgcgcatggcccgcctgctgtcaccaggggcgaggctcatcaccatcgagatcaaccccgactgtgccgccatcacccagcggatggtggatttcgctggcatgaaggacaaggtcacccttgtggttggagcgtcccaggacatcatcccccagctgaagaagaagtatgatgtggacacactggacatggtcttcctcgaccactggaaggaccggtacctgccggacacgcttctcttggaggaatgtggcctgctgcggaaggggacagtgctactggctgacaacgtgatctgcccaggtgcgccagacttcctagcacacgtgcgcgggagcagctgctttgagtgcacacactaccaatcgttcctggaatacagggaggtggtggacggcctggagaaggccatctacaagggcccaggcagcgaagcagggccctgactgcccccccggcccccctctcgggctctctcacccagcctggtactgaaggtgccagacgtgctcctgctgaccttctgcggctccgggctgtgtcctaaatgcaaagcacacctcggccgaggcctgcgccctgacatgctaacctctctgaactgcaacactggattgttcttttttaagactcaatcatgacttctttactaacactggctagctatattatcttatatactaatatcatgttttaaaaatataaaatagaaattaagaatctaaaaaaaaaaa

SEQ ID NO: 643 - DNA, 2175 bp, Homo sapiens
  misc_feature: Incyte ID No: 246024.4
gggatccacacagctcagaacagctggatcttgctcacactctttcaagagaagcttccttggacaaaaggaccctgccttggtgtgagagtgagggcagagggagctggagcaagtagaatttctctaaataccagctggctggggcccaggagattaaaaaacaccgggctagggttaagaaaaaaaacgaacccttccagtcaggtcagtgactggagagctccaaggaaagtctctcagtgacctggctgctggcaccatggactcagaaaagaaacgctttactgaagaggccaccaaatacttccgggagagagtcagcccagtgcatctgcaaatcctgctgactaacaatgaagcctggaagagattcgtgactgcggctgaattgcccagggatgaggcagatgctctctacgaagctctgaagaagcttagaacatatgcagctattgaggacgaatatgtgcagcagaaagatgagcagtttagggaatggtttttgaaagagtttccccaagtcaagaggaagatccaggagtccatagaaaagcttcgtgcccttgcaaatggtattgaagaggtccacagaggctgcaccatctccaatgtggtgtccagctccactggcgctgcctctggcatcatgtcccttgctggtcttgttttggcaccatttacagcagggacgagtctggcccttactgcagctggggtagggctgggagcagcgtctgctgtgactgggatcaccaccagcatcgtggagcactcatacacatcatcagcagaagctgaagccagcaggctgactgcaaccagcattgaccgattgaaggtatttaaggaagttatgcgtgacatcacacccaacttactttcccttcttaataattattacgaagccacacaaaccattgggagtgaaatccgtgccatcaggcaagccagagccagggcccgactccctgtgaccacctggcgaatctcagctggaagtggaggtcaagcagagagaacgattgcaggcaccacccgggcagtgagcagaggagcccggatcctgagtgcgaccacttcaggcatcttccttgcactggatgtggtcaaccttgtatacgagtcaaagcacttgcatgagggggcaaagtctgcatctgctgaggagctgaggcggcaggctcaggagctggaggagaatctaatggagctcactcagatctatcagcgtctgaatccatgccatacccactgaccccagaccagtgcagccagcaggggaggtgagccatacacaggccacgacaaaatgcaggcattttattagggggataaagagggcaaggtaaagtttatggagctgagtgttagtgactttggcatttctgtagctgagcacagcaggggaggggttaatgcagatggcaagtgcaccaaggagaaggcaggaatgctggagcctggaataagggaggagaggggactggagagtgtggggaataggaagaagaaatttcctttagactaacgaatatattggggggaggaatagaggggaggtgtgcaggaaccagcaatgagaaggccaggaaaagaaagagctgaaaatgcagaaagccgaagagttagaacttttggatacagcagaagaaacagcggctccactaccgacctgcccccggttcgatgtccttccaagaatgaagtctttccctggtgatggtcccctgccctgtctttccagcatccactctgtcttgtcctcctggaagtgtatctcagtcagccagtggcttcttgatgatggcggtggaggtggtggttgtagtgtgatggatcccctttaggttatttaggggtatatgtcccctgcttgaaccctgaaggccaggtaatgagccatggccattgtccccagctgaggaccaggtgtctctaaaaacccaaacatcctggagagtatgcgagaacctaccaagaaaaacagtctcattactcatatacagcaggcaaagagacagaaaattaactgaaaagcagtttagagactgggggaggccggatctctagagccatcctgctgagtgccctgtgtgtaagtcctaataaactcacctactcaccaaaaaaaaaaacgaaaaactaaagaacaggagaaaaaaaggggagggc

SEQ ID NO: 644 - DNA, 2174 bp, Homo sapiens
  misc_feature: Incyte ID No: 161190CB1
ggatccacacagctcagaacagctggatcttgctcacactctttcaagagaagcttccttggacaaaaggaccctgccttggtgtgagagtgagggcagagggagctggagcaagtagaatttctctaaataccagctggctggggcccaggagattaaaaaacaccgggctagggttaagaaaaaaaacgaacccttccagtcaggtcagtgactggagagctccaaggaaagtctctcagtgacctggctgctggcaccatggactcagaaaagaaacgctttactgaagaggccaccaaatacttccgggagagagtcagcccagtgcatctgcaaatcctgctgactaacaatgaagcctggaagagattcgtgactgcggctgaattgcccagggatgaggcagatgctctctacgaagctctgaagaagcttagaacatatgcagctattgaggacgaatatgtgcagcagaaagatgagcagtttagggaatggtttttgaaagagtttccccaagtcaagaggaagatccaggagtccatagaaaagcttcgtgcccttgcaaatggtattgaagaggtccacagaggctgcaccatctccaatgtggtgtccagctccactggcgctgcctctggcatcatgtcccttgctggtcttgttttggcaccatttacagcagggacgagtctggcccttactgcagctggggtagggctgggagcagcgtctgctgtgactgggatcaccaccagcatcgtggagcactcatacacatcatcagcagaagctgaagccagcaggctgactgcaaccagcattgaccgattgaaggtatttaaggaagttatgcgtgacatcacacccaacttactttcccttcttaataattattacgaagccacacaaaccattgggagtgaaatccgtgccatcaggcaagccagagccagggcccgactccctgtgaccacctggcgaatctcagctggaagtggaggtcaagcagagagaacgattgcaggcaccacccgggcagtgagcagaggagcccggatcctgagtgcgaccacttcaggcatcttccttgcactggatgtggtcaaccttgtatacgagtcaaagcacttgcatgagggggcaaagtctgcatctgctgaggagctgaggcggcaggctcaggagctggaggagaatctaatggagctcactcagatctatcagcgtctgaatccatgccatacccactgaccccagaccagtgcagccagcaggggaggtgagccatacacaggccacgacaaaatgcaggcattttattagggggataaagagggcaaggtaaagtttatggagctgagtgttagtgactttggcatttctgtagctgagcacagcaggggaggggttaatgcagatggcaagtgcaccaaggagaaggcaggaatgctggagcctggaataagggaagagaggggactggagagtgtggggaataggaagaagaaatttcctttagactaacgaatatattggggggaggaatagaggggaggtgtgcaggaaccagcaatgagaaggccaggaaaagaaagagctgaaaatgcagaaagccgaagagttagaacttttggatacagcagaagaaacagcggctccactaccgacctgcccccggttcgatgtccttccaagaatgaagtctttccctggtgatggtcccctgccctgtctttccagcatccactctgtcttgtcctcctggaagtgtatctcagtcagccagtggcttcttgatgatggcggtggaggtggtggttgtagtgtgatggatcccctttaggttatttaggggtatatgtcccctgcttgaaccctgaaggccaggtaatgagccatggccattgtccccagctgaggaccaggtgtctctaaaaacccaaacatcctggagagtatgcgagaacctaccaagaaaaacagtctcattactcatatacagcaggcaaagagacagaaaattaactgaaaagcagtttagagactgggggaggccggatctctagagccatcctgctgagtgccctgtgtgtaagtcctaataaactcacctactcaccaaaaaaaaaaacgaaaaactaaagaacaggagaaaaaaaggggagggc

SEQ ID NO: 645 - DNA, 3016 bp, Homo sapiens
  misc_feature: Incyte ID No: 2626024CB1
gttatgcctagaaaacatttctcaagaattagaattacgatatgctgtcaaacacaatgacttatttgaacctcttttatttgtaggttgaagcactggacaatgccacatactttgtggatggtgtgggtcttgggggtcatcatcagcctctccaaggaagaatcctccaatcaggcttctctgtcttgtgaccgcaatggtatctgcaagggcagctcaggatctttaaactccattccctcagggctcacagaagctgtaaaaagccttgacctgtccaacaacaggatcacctacattagcaacagtgacctacagaggtgtgtgaacctccaggctctggtgctgacatccaatggaattaacacaatagaggaagattctttttcttccctgggcagtcttgaacatttagacttatcctataattacttatctaatttatcgtcttcctggttcaagcccctttcttctttaacattcttaaacttactgggaaatccttacaaaaccctaggggaaacatctcttttttctcatctcacaaaattgcaaatcctgagagtgggaaatatggacaccttcactaagattcaaagaaaagattttgctggacttaccttccttgaggaacttgagattgatgcttcagatctacagagctatgagccaaaaagtttgaagtcaattcagaatgtaagtcatctgatccttcatatgaagcagcatattttactgctggagatttttgtagatgttacaagttccgtggaatgtttggaactgcgagatactgatttggacactttccatttttcagaactatccactggtgaaacaaattcattgattaaaaagtttacatttagaaatgtgaaaatcaccgatgaaagtttgtttcaggttatgaaacttttgaatcagatttctggattgttagaattagagtttgatgactgtacccttaatggagttggtaattttagagcatctgataatgacagagttatagatccaggtaaagtggaaacgttaacaatccggaggctgcatattccaaggttttacttattttatgatctgagcactttatattcacttacagaaagagttaaaagaatcacagtagaaaacagtaaagtttttctggttccttgtttactttcacaacatttaaaatcattagaatacttggatctcagtgaaaatttgatggttgaagaatacttgaaaaattcagcctgtgaggatgcctggccctctctacaaactttaattttaaggcaaaatcatttggcatcattggaaaaaaccggagagactttgctcactctgaaaaacttgactaacattgatatcagtaagaatagttttcattctatgcctgaaacttgtcagtggccagaaaagatgaaatatttgaacttatccagcacacgaatacacagtgtaacaggctgcattcccaagacactggaaattttagatgttagcaacaacaatctcaatttattttctttgaatttgccgcaactcaaagaactttatatttccagaaataagttgatgactctaccagatgcctccctcttacccatgttactagtattgaaaatcagtaggaatgcaataactacgttttctaaggagcaacttgactcatttcacacactgaagactttggaagctggtggcaataacttcatttgctcctgtgaattcctctccttcactcaggagcagcaagcactggccaaagtcttgattgattggccagcaaattacctgtgtgactctccatcccatgtgcgtggccagcaggttcaggatgtccgcctctcggtgtcggaatgtcacaggacagcactggtgtctggcatgtgctgtgctctgttcctgctgatcctgctcacgggggtcctgtgccaccgtttccatggcctgtggtatatgaaaatgatgtgggcctggctccaggccaaaaggaagcccaggaaagctcccagcaggaacatctgctatgatgcatttgtttcttacagtgagcgggatgcctactgggtggagaaccttatggtccaggagctggagaacttcaatccccccttcaagttgtgtcttcataagcgggacttcattcctggcaagtggatcattgacaatatcattgactccattgaaaagagccacaaaactgtctttgtgctttctgaaaactttgtgaagagtgagtggtgcaagtatgaactggacttctcccatttccgtctttttgatgagaacaatgatgctgccattctcattcttctggagcccattgagaaaaaagccattccccagcgcttctgcaagctgcggaagataatgaacaccaagacctacctggagtggcccatggacgaggctcagcgggaaggattttgggtaaatctgagagctgcgataaagtcctaggttcccatatttaagaccagtctttgtctagttgggatctttatgtcactagttatagttaagttcattcagacataattatataaaaactacgtggatgtaccgtcatttgaggacttgcttactaaaactacaaaacttcaaattttgtctggggtgctgttttataaacatatgccagatttaaaaattggtttttggtttttcttttttctatgagataaccatgatcataagtctattactgatatctgaatatagtcccttggtatccaagggaattggttgcaggatcctcgtggatatcaaaattcatagatgatcaagtcccttataagagtggcatagtatttgcatataacctgtgtacattctcctgtatactttaaatcatctctagattacttatgatacccaatacaatgtaaatactatgtaaatagttgtactgtctttttatttatattattattgttattttttattttcaaaatttttaaaacatacttttgatccacagttggttgacttcatggatgcagaacccatggatatagag

SEQ ID NO: 646 - DNA, 2710 bp, Homo sapiens
  misc_feature: Incyte ID No: 4248172CB1
tggcggggcggtgtcggcggccggagcccccgcgcgggccgcctatcgggctgcatatctatgtgagactgaattttcctcttagacttcagctaaaactgtgtattgcatcaggctgagagcagacacgatgtgaagatccattgctcccattgaggcagacaagacaaatttacatgtattggagaccagaccagaagcccttctgaattaagatctcacattcttgaaggtggcattgaagagcactaagatcggaagatgagtgagcttgaccagttacggcaggaggccgagcaacttaagaaccagattcgagacgccaggaaagcatgtgcagatgcaactctctctcagatcacaaacaacatcgacccagtgggaagaatccaaatgcgcacgaggaggacactgcgggggcacctggccaagatctacgccatgcactggggcacagactccaggcttctcgtcagtgcctcgcaggatggtaaacttatcatctgggacagctacaccaccaacaaggtccacgccatccctctgcgctcctcctgggtcatgacctgtgcatatgccccttctgggaactatgtggcctgcggtggcctggataacatttgctccatttacaatctgaaaactcgtgaggggaacgtgcgcgtgagtcgtgagctggcaggacacacaggttacctgtcctgctgccgattcctggatgacaatcagatcgtcaccagctctggagacaccacgtgtgccctgtgggacatcgagaccggccagcagacgaccacgtttaccggacacactggagatgtcatgagcctttctcttgctcctgacaccagactgttcgtctctggtgcttgtgatgcttcagccaaactctgggatgtgcgagaaggcatgtgccggcagaccttcactggccacgagtctgacatcaatgccatttgcttctttccaaatggcaatgcatttgccactggctcagacgacgccacctgcaggctgtttgaccttcgtgctgaccaggagctcatgacttactcccatgacaacatcatctgcgggatcacctctgtctccttctccaagagcgggcgcctcctccttgctgggtacgacgacttcaactgcaacgtctgggatgcactcaaagccgaccgggcaggtgtcttggctgggcatgacaaccgcgtcagctgcctgggcgtgactgacgatggcatggctgtggcgacagggtcctgggatagcttcctcaagatctggaactaacgccagtagcatgtggatgccatggagactggaagaccattccaacttggacgcgttaccatgagagcatatcctatccaaccgtactaacgtggacaccctacacctcccctcagaacttcaaaagggcaagatcttttttccttcacttattgctgaaaccaagagcacaattcccattgagagaaagatctctgtgctgtaaactaaaacaaattgtgcattccttccggggccatcgtctttgttttcttttttgtcttgaatgaattttaaaaggaaatatataataaaaatgttaaccagaaggtaaacttgagtgtaattgtcagacagacacacttttccaccagtgtatttgaattttagaccagtgaccctgttttgtggcattcatgcaaaacatgctgagggctttgttcatctggtcatcgtgtccaaatttcagtcatgtttgtagcaagattttggaagcattcatatttcctttttaaaatgtattcctttgtgttcaacagttaatcaaaaccagagagtctagggcagcctctctgatgttgtcaatgatgtaaattcagtccctggtttttaattttctgtctgatgtcacagatcattgttgcacacaaacgtggcatagaaaagaacatgttcagaagccatggggccaagcacatgcggggacggtctcaaatgcgtgatcagagaatccttcacctttgctgaaaagtgagctcagatccagcaccatgttcctcctgacccatcctgtctatcttctcagttgagtttttaatctcactttgggtttccttgtgaagttggagggaagtttataatagcctaacactaccccacccccaactaggaggaacctctgttttcaagagagatgcctgtcctgtgcttggatagtcagtcaattatttgtgtatgaaacaatgtacaaatcaatgttttgaaaataatgatctcagactttctaagttaaattttaaaaattttgattgtttgccatattgggtgggtttactcttagaatcgcatgctgtagaaatgctcaaaagtgcatatgggactcagtccttaggtgttctttttcttttaagaaataacctcttacagttgtaaccattgcggctctgtccacttctcgttgctgctctgtggcacatatcggaagcagtacagcgcgcggctctacacgcttgggtagcgggataagtcactgttttctttatttctttaaaaaaaaaaaaaagttctgttgcaaacgactgctgttggattctgagggtggggagggagagagagggagggagagggagtgaagagcctgccctcctatatggattcttcagggccctccacatctgaggtggctcattcccatcacacacagattgtcctggtgttcatttcaagg

SEQ ID NO: 647 - DNA, 2782 bp, Homo sapiens
  misc_feature: Incyte ID No: 1519595CB1
cgcccgcttgcccgtcggtcgctagctcgctcggtgcgcgtcgtcccgctccatggcgctcttcgtgcggctgctggctctcgccctggctctggccctgggccccgccgcgaccctggcgggtcccgccaagtcgccctaccagctggtgctgcagcacagcaggctccggggccgccagcacggccccaacgtgtgtgctgtgcagaaggttattggcactaataggaagtacttcaccaactgcaagcagtggtaccaaaggaaaatctgtggcaaatcaacagtcatcagctacgagtgctgtcctggatatgaaaaggtccctggggagaagggctgtccagcagccctaccactctcaaacctttacgagaccctgggagtcgttggatccaccaccactcagctgtacacggaccgcacggagaagctgaggcctgagatggaggggcccggcagcttcaccatcttcgcccctagcaacgaggcctgggcctccttgccagctgaagtgctggactccctggtcagcaatgtcaacattgagctgctcaatgccctccgctaccatatggtgggcaggcgagtcctgactgatgagctgaaacacggcatgaccctcacctctatgtaccagaattccaacatccagatccaccactatcctaatgggattgtaactgtgaactgtgcccggctgctgaaagccgaccaccatgcaaccaacggggtggtgcacctcatcgataaggtcatctccaccatcaccaacaacatccagcagatcattgagatcgaggacacctttgagacccttcgggctgctgtggctgcatcagggctcaacacgatgcttgaaggtaacggccagtacacgcttttggccccgaccaatgaggccttcgagaagatccctagtgagactttgaaccgtatcctgggcgacccagaagccctgagagacctgctgaacaaccacatcttgaagtcagctatgtgtgctgaagccatcgttgcggggctgtctgtagagaccctggagggcacgacactggaggtgggctgcagcggggacatgctcactatcaacgggaaggcgatcatctccaataaagacatcctagccaccaacggggtgatccactacattgatgagctactcatcccagactcagccaagacactatttgaattggctgcagagtctgatgtgtccacagccattgaccttttcagacaagccggcctcggcaatcatctctctggaagtgagcggttgaccctcctggctcccctgaattctgtattcaaagatggaacccctccaattgatgcccatacaaggaatttgcttcggaaccacataattaaagaccagctggcctctaagtatctgtaccatggacagaccctggaaactctgggcggcaaaaaactgagagtttttgtttatcgtaatagcctctgcattgagaacagctgcatcgcggcccacgacaagagggggaggtacgggaccctgttcacgatggaccgggtgctgacccccccaatggggactgtcatggatgtcctgaagggagacaatcgctttagcatgctggtagctgccatccagtctgcaggactgacggagaccctcaaccgggaaggagtctacacagtctttgctcccacaaatgaagccttccgagccctgccaccaagagaacggagcagactcttgggagatgccaaggaacttgccaacatcctgaaataccacattggtgatgaaatcctggttagcggaggcatcggggccctggtgcggctaaagtctctccaaggtgacaagctggaagtcagcttgaaaaacaatgtggtgagtgtcaacaaggagcctgttgccgagcctgacatcatggccacaaatggcgtggtccatgtcatcaccaatgttctgcagcctccagccaacagacctcaggaaagaggggatgaacttgcagactctgcgcttgagatcttcaaacaagcatcagcgttttccagggcttcccagaggtctgtgcgactagcccctgtctatcaaaagttattagagaggatgaagcattagcttgaagcactacaggaggaatgcaccacggcagctctccgccaatttctctcagatttccacagagactgtttgaatgttttcaaaaccaagtatcacactttaatgtacatgggccgcaccataatgagatgtgagccttgtgcatgtgggggaggagggagagagatgtactttttaaatcatgttccccctaaacatggctgttaacccactgcatgcagaaacttggatgtcactgcctgacattcacttccagagaggacctatcccaaatgtggaattgactgcctatgccaagtccctggaaaaggagcttcagtattgtggggctcataaaacatgaatcaagcaatccagcctcatgggaagtcctggcacagtttttgtaaagcccttgcacagctggagaaatggcatcattataagctatgagttgaaatgttctgtcaaatgtgtctcacatctacacgtggcttggaggcttttatggggccctgtccaggtagaaaagaaatggtatgtagagcttagatgtccctattgtgacagagccatggtgtgtttgtaataataaaaccaaagaaacataaaagcctccaagcaacgtgtagatgtgagacacatttgacagaacatctcaactcatagcttataatgatgccatttctccagctg

SEQ ID NO: 648 - DNA, 2026 bp, Homo sapiens
  misc_feature: Incyte ID No: 982803.3
  unsure 25, 31, 34, 39, 92, 102, 125, 141, 150, 165, 179, 184, 187, 195, 197,1296, 1300: a, t, c, g, or other
ctaagatcacaccagtccaggctgngaatgntgngcagntgctggccgtaaatgccgaggaggacgcctggatacgggcacaggtcatcttnaacagaaganaacaaaataaaggtatgctatgntgactatggctttagngaaaatgtngaaaaaagcaaagcntacaaattaaaccngaagnttngctcactntnatttcaagctacaaaatgtaagcttgcaggcttggaagtcctaagcgatgaccctgatctagtgaaggtggttgaatctttaacttgtgggaaagatctttgcagtgggaaatactttgacaaagctgacattccacttgttgttctgtacgatacctcaggagaagatgatatcaatatcaatgccacctgcttgaaggctatatgtgacaagtcactaagaggttcacctgcaggttgacgccatgtacacaaatgtcaaagtaactaatatttgctctgatgggacactctactgccaggtgccttgtaagggtctgaacaagctcagtgaccttctacgtaagatagaggactacttccattgcaagcacatgacctctgagtgctttgtttcattacccttctgtgggaaaatctgcctcttccattgcaaaggaaaatggttacgagtagagatcacaaatgttcacagcagccgggctcttgatgttcagttcctggactctggcactgtgacatctgtaaaagtgtcagagctcagggaaattccacctcggtttctacaagaaatgattgcaataccacctcaggccattaagtgctgtttagcagatcttccacaatctattggcatgtggacaccagatgcagtgctgtggttaagagattctgttttgaattgctcggactgtagcattaaggttacaaaagtggatgaaaccagagggatcgcacatgtttatttatttacccctaagaacttccctgaccctcatcgcagtattaatcgccagattacaaatgcagacttgtggaagcatcagaaggatgtgtttttgagtgccatatccagtggagctgactctcccaacagcaaaaatggcaacatgcccatgtcgggcaacactggagagaatttcagaaagaacctcacagatgtcatcaaaaagtccatggtggaccatacgagcgctttctccacagaggaactgccacctcctgtccacttatcaaagccaggggaacacatggatgtgtatgtgcctgtggcctgtcacccaggctacttcgtcatccagccttggcaggagatacntaanctggaagttctgatggaagagatgattctatattacagcgtgtctgaagagcgccacatagcagtggagaaagaccaagtgtatgctgcaaaagtggaaaataagtggcacagggtgcttttaaaaggaatcctgaccaatggactggtatctgtgtatgagctggattatggcaaacacgaattagtcaacataagaaaagtacagcccctagtggacatgttccgaaagctgcccttccaagcagtcacagctcaacttgcaggagtgaagtgcaaccagtggtctgaggaggcttctatggtgtttcgaaatcatgtggagaagaaacctctggtggcactggtgcagacagtcattgaaaatgctaacccttgggaccggaaagtagtggtctacttagtggacacatcgttgccagacaccgatacctggattcatgattttatgtcagagtatctgatagagctttcaaaagttaattaatgactgcctctgaaaccttgacaactaattcagattttttagcaataacaaaatgtagtaggcttaaaaaaaatcttaactctgctacatggctctgactgctgtgggggattgaaaagaatatgcttatgtttgatgaaagatatttaacaagttttgttttaacagagttgacttttcaaagaaaattgtacttgaattattactataatattagaataaaaatgtttatcaatataa

SEQ ID NO: 649 - DNA, 1835 bp, Homo sapiens
  misc_feature: Incyte ID No: 1966280CB1
tccgctcaaactcagctcacttgagagtctcctcccgccagctgtggaaagaactttgcgtctctccagcaatgcatctccttgcgattctgttttgtgctctctggtctgcagtgttggccgagaactcggatgattatgatctcatgtatgtgaatttggacaacgaaatagacaatggactccatcccactgaggaccccacgccgtgcgactgcggtcaggagcactcggaatgggacaagctcttcatcatgctggagaactcgcagatgagagagcgcatgctgctgcaagccacggacgacgtcctgcggggcgagctgcagaggctgcgggaggagctgggccggctcgcggaaagcctggcgaggccgtgcgcgccgggggctcccgcagaggccaggctgaccagtgctctggacgagctgctgcaggcgacccgcgacgcgggccgcaggctggcgcgtatggagggcgcggaggcgcagcgcccagaggaggcggggcgcgccctggccgcggtgctagaggagctgcggcagacgcgagccgacctgcacgcggtgcagggctgggctgcccggagctggctgccggcaggttgtgaaacagctattttattcccaatgcgttccaagaagatttttggaagcgtgcatccagtgagaccaatgaggcttgagtcttttagtgcctgcatttgggtcaaagccacagatgtattaaacaaaaccatcctgttttcctatggcacaaagaggaatccatatgaaatccagctgtatctcagctaccaatccatagtgtttgtggtgggtggagaggagaacaaactggttgctgaagccatggtttccctgggaaggtggacccacctgtgcggcacctggaattcagaggaagggctcacatccttgtgggtaaatggtgaactggcggctaccactgttgagatggccacaggtcacattgttcctgagggaggaatcctgcagattggccaagaaaagaatggctgctgtgtgggtggtggctttgatgaaacattagccttctctgggagactcacaggcttcaatatctgggatagtgttcttagcaatgaagagataagagagaccggaggagcagagtcttgtcacatccgggggaatattgttgggtggggagtcacagagatccagccacatggaggagctcagtatgtttcataaatgttgtgaaactccacttgaagccaaagaaagaaactcacacttaaaacacatgccagttgggaaggtctgaaaactcagtgcataataggaacacttgagactaatgaaagagagagttgagaccaatctttatttgtactggccaaatactgaataaacagttgaaggaaagacattggaaaaagcttttgaggataatgttactagactttatgccatggtgctttcagtttaatgctgtgtctctgtcagataaactctcaaataattaaaaaggactgtattgttgaacagagggacaattgttttacttttctttggttaattttgttttggccagagatgaattttacattggaagaataacaaaataagatttgttgtccattgttcattgttattggtatgtaccttattacaaaaaaaatgatgaaaacatatttatactacaaggtgacttaacaactataaatgtagtttatgtgttataatcgaatgtcacgtttttgagaagatagtcatataagttatattgcaaaagggatttgtattaatttaagactatttttgtaaagctctactgtaaataaaatattttataaaactaaaaaaaaa

SEQ ID NO: 650 - DNA, 2160 bp, Homo sapiens
  misc_feature: Incyte ID No: 2754960CB1
gacagcgcaaccgcactccagcctggacgacagaatgagactccgtctcaaaaaaaaaaaaaaaaaaaaaaagcgagggctggaagtctggagcaggtgcgcggctgcaacggcagccgcgggaagctcgggccggcagggtttccccgcacgctggcgcccagctcccggcgcggaggccgctgtaagtttcgctttccattcagtggaaaacgaaagctgggcggggtgccacgagcgcggggccagaccaaggcgggcccggagcggaacttcggtcccagctcggtccccggctcagtcccgacgtggaactcagcagcggaggctggacgcttgcatggcgcttgagagattccatcgtgcctggctcacataagcgcttcctggaagtgaagtcgtgctgtcctgaacgcgggccaggcagctgcggcctgggggttttggagtgatcacgaatgagcaaggcgtttgggctcctgaggcaaatctgtcagtccatcctggctgagtcctcgcagtccccggcagatcttgaagaaaagaaggaagaagacagcaacatgaagagagagcagcccagagagcgtcccagggcctgggactaccctcatggcctggttggtttacacaacattggacagacctgctgccttaactccttgattcaggtgttcgtaatgaatgtggacttcaccaggatattgaagaggatcacggtgcccaggggagctgacgagcagaggagaagcgtccctttccagatgcttctgctgctggagaagatgcaggacagccggcagaaagcagtgcggcccctggagctggcctactgcctgcagaagtgcaacgtgcccttgtttgtccaacatgatgctgcccaactgtacctcaaactctggaacctgattaaggaccagatcactgatgtgcacttggtggagagactgcaggccctgtatacgatccgggtgaaggactccttgatttgcgttgactgtgccatggagagtagcagaaacagcagcatgctcaccctcccactttctctttttgatgtggactcaaagcccctgaagacactggaggacgccctgcactgcttcttccagcccagggagttatcaagcaaaagcaagtgcttctgtgagaactgtgggaagaagacccgtgggaaacaggtcttgaagctgacccatttgccccagaccctgacaatccacctcatgcgattctccatcaggaattcacagacgagaaagatctgccactccctgtacttcccccagagcttggatttcagccagatccttccaatgaagcgagagtcttgtgatgctgaggagcagtctggagggcagtatgagctttttgctgtgattgcgcacgtgggaatggcagactccggtcattactgtgtctacatccggaatgctgtggatggaaaatggttctgcttcaatgactccaatatttgcttggtgtcctgggaagacatccagtgtacctacggaaatcctaactaccactggcaggaaactgcatatcttctggtttacatgaagatggagtgctaatggaaatgcccaaaaccttcagagattgacacgctgtcattttccatttccgttcctggatctacggagtcttctaagagattttgcaatgaggagaagcattgttttcaaactatataactgagccttatttataattagggatattatcaaaatatgtaaccatgaggcccctcaggtcctgatcagtcagaatggatgctttcaccagcagacccggccatgtggctgctcggtcctgggtgctcgctgctgtgcaagacattagccctttagttatgagcctgtgggaacttcaggggttcccagtggggagagcagtggcagtgggaggcatctgggggccaaaggtcagtggcagggggtatttcagtattatacaactgctgtgaccagacttgtatactggctgaatatcagtgctgtttgtaatttttcactttgagaaccaacattaattccatatgaatcaagtgttttgtaactgctattcatttattcagcaaatatttattgatcatctcttctccataagatagtgtgataaacacagtcatgaataaagttattttccacaaaaaaa

SEQ ID NO: 651 - DNA, 1080 bp, Homo sapiens
  misc_feature: Incyte ID No: 218602.13
ccaggcgagagtgctaatctagccttggtttgggggcctctctcatgacctgccttccatctcttgcgtgctctgccctgccaagctgctgagccttcgcagttcaggatccacactcgggaaagcccctcctggagggtgcccactggctgtgggtcgggactgttttctaatattctaaagtcccagagtcgggcctagtgtgggcaggtataaatgtatgaggcagtcgtgtttgtggtggtgggtgaactgtctcgtgcctgtctctttccagtctggagggcagtatgagctttttgctgtgattgcgcacgtgggaatggcagactccggtcattactgtgtctacatccggaatgctgtggatggaaaatggttctgcttcaatgactccaatatttgcttggtgtcctgggaagacatccagtgtacctacggaaatcctaactaccactggcaggaaactgcatatcttctggtttacatgaagatggagtgctaatgggaaatgcccaaaaccttcagagattgacacgctgtcattttccatttccgttcctggatctacggagtcttctaagagattttgcaatgaggagaagcattgttttcaaactatataactgagccttatttataattagggatattatcaaaatatgtaaccatgaggcccctcaggtcctgatcagtcagaatggatgctttcaccagcagacccggccatgtggctgctcggtcctgggtgctcgctgctgtgcaagacattagccctttagttatgagcctgtgggaacttcaggggttcccagtggggagagcagtggcagtgggaggcatctgggggccaaaggtcagtggcagggggtatttcagtattatacaactgctgtgaccagacttgtatactggctgaatatcagtgctgtttgtaatttttcactttgagaaccaacattaattccatatgaatcaagtgttttgtaactgctattcatttattcagcaaatatttattgatcatctcttctccataagatagtgtgataaacacagtcatgaataaagttattttcc

SEQ ID NO: 652 - DNA, 3840 bp, Homo sapiens
  misc_feature: Incyte ID No: 328977.2
  unsure 1746, 1750, 1752, 1763, 1769, 2827, 2841, 3206: a, t, c, g, or other
gaggcgaaccggagcgcggggccgcggtcgccccgaccagagccgggagaccgcagcacccgcagccgcccgcgagcgcgccgaagacagcgcgcaggcgagagcgcgcgggcgggggcgcgcaggccctgcccgccccttccgtccccacccccctccgccctttcctctccccaccttcctctcgcctcccgcgcccccgcaccgggcgcccaccctgtcctcctcctgcgggagcgttgtccgtgttggcggccgcagcgggccgggccggtccggcggggccgggggatggcgctgctggacctggccttggagggaatggccgtcttcgggttcgtcctcttcttggtgctgtggctgatgcatttcatggctatcatctacacccgattacacctcaacaagaaggcaactgacaaacagccttatagcaagctcccaggtgtctctcttctgaaaccactgaaaggggtagatcctaacttaatcaacaacctggaaacattctttgaattggattatcccaaatatgaagtgctcctttgtgtacaagatcatgatgatccagccattgatgtatgtaagaagcttcttggaaaatatccaaatgttgatgctagattgtttataggtggcaaaaaagttggcattaatcctaaaattaataatttaatgccaggatatgaagttgcaaagtatgatcttatatggatttgtgatagtggaataagagtaattccagatacgcttactgacatggtgaatcaaatgacagaaaaagtaggcttggttcacgggctgccttacgtagcagacagacagggctttgctgccaccttagagcaggtatattttggaacttcacatccaagatactatatctctgccaatgtaactggtttcaaatgtgtgacaggaatgtcttgtttaatgagaaaagatgtgttggatcaagcaggaggacttatagcttttgctcagtacattgccgaagattactttatggccaaagcgatagctgaccgaggttggaggtttgcaatgtccactcaagttgcaatgcaaaactctggctcatattcaatttctcagtttcaatccagaatgatcaggtggaccaaactacgaattaacatgcttcctgctacgataatttgtgagccaatttcagaatgctttgttgccagtttaattattggatgggcagcccaccatgtgttcagatgggatattatggtatttttcatgtgtcattgcctggcatggtttatatttgactacattcaactcaggggtgtccagggtggcacactgtgtttttcaaaacttgattatgcagtcgcctggttcatccgcgaatccatgacaatatacatttttttgtctgcattatgggacccaactataagctggagaactggtcgctacagattacgctgtgggggtacagcagaggaaatcctagatgtataactacagctttgtgactgtatataaaggaaaaaagagaagtattataaattatgtttatataaatgcttttaaaaatctaccttctgtagttttatcacatgtatgttttggtatctgttctttaatttatttttgcatggcacttgcatctgtgaaaaaaaaaaaaaacacatctgtagtcttggccaaatgatacactttattttgtggaagtagagaatcaagagaattggttctaggaacctgggttcgttcatcattgttgtttantttngnaaaataaatanataaanatatatatagatgctctgcaacaaactctgtgacagtatccttcagtagagaaagtttcttacttgtgagtacactcttttagaacatttacgggtggcagcagctttgctttagagtttagaagataatagaaggaatgactattcatgtccaaagtgaatggttttgtgcagtgaacaacacatggcgaggtactaactgagaaactttttcatgctttatgcctacctcttgtagttgttgcagagcaaatacaaattgtaataagatagctaggccttgcagaaacaaacagaaaaacttaaaaaaaaatgatataagagctggagtctagtatttatatgaatctgtgagagataatttttttggtctcactgcaatgaaccaaaagcggctgagtttggtttttaattgtagccatgtattgaaggcatctttttgaccaactcttgttggttctgtcttgaaccattgttaatcactgtgctgtaattagtatagctaaatcttttccttccttgctcctcccccagcccaccccgtcttcccttaacattttttcagggggggttgggagtggtttcattttagtgtgagtggatgttttgatagttgtaaggaaaaaatgcatttcagacacatttcacacatgagctattttcttacacagtatgtcttattgttaataagaatgtaatttcatgatacaagtatttaataccttttttaagtcagtaaatattctagccatcaataaattgcagtagagtattaagaggggacaggatgagtttactcttaaaattaatcagtatcaaactaagtctactgtgtgtgtttttttttttgttttttgtttttgtttgtttactattatagtaagtctagtcttatttaaattggacttttgtattccagtttatatgacaaaatagactagatcagcgctggttgtaaatgcatgctgtacctcactgttttctccccatcatgccgctaaacttgctcgccaggttgtgcttaacttgtggtgaactggacttgattctgttttgtnttgtttttttaaanaaaaaaacaaaaatgtaagggacagtgcataagccttttctttgttaagtagtggtgttttgctttttcttcaggattggatggcatgttgtccacaggaatgcctactgcagggctaacactggcaatatggcagctttaaattctgagttactacagtctccatgtcaaagcataatgtgtagcatatcagcaataactacatatttatagaaaacactttttcactttactgagccaattcatttaattgtcaaatgtctatatccatggtttaaatggcaacatatctataagtatgtatacacattatatttaagcttttctctgggccaaactgcttcatccttttttctttctttttntttttttttagccttatgatgaatttgtttgaagggcattttctttatgaacaaaggcttggatgcatattcctttctttctgtgaatgggtattattccctgaggaaagttgcacagtgaaaaccagtctggttgtgacccactacatgttttgtttttaatcactattacctgagttgaactttgctcaccatgtttgtacttgttggtctgtttaatgaagtttggttgatgccatcctttgcactgccgaagcgtaatcttgtgtattacttagctctctgctgatctcagtatggacagtgtaacaacaaaaccaaaatggctggacagacttcttgtgttttgtaaatataaactaggacagttctgtaggtttgttcagtgtgctagtggagtatttccttaatgtaaaacttcacttaacagagagattctttgtttagcaagcttggagtgatgataaaatggtaagaaataatataaatgttgaagaaagcatcacaacagaactataggagtctaaatttaataaatctttaaaaaaaaccagtgtctagaatatataccatgttttattatttaaaatcattgtcttaaatttttgttcaaaaaataaaaatttgaatacaa

SEQ ID NO: 653 - DNA, 2889 bp, Homo sapiens
  misc_feature: Incyte ID No: 480500.5
gtttcctgcatctccaaacatggcgacctaggagaaagggaagaacaattttttctcctcttttgggaaggtttgtgtctagtagtgcctgtgcccctgggcagattggagagaagagggacgactggagaatcgtcgagaaccagcggagaaaagaaaaagcaacgtttaattctagaaggcctcctgtccctgcctgctctgggtgctcatggaatcagctgctgccctgcacttctcccggccagcctccctcctcctcctcctcctcagcctgtgtgcactggtctcagcccagtttattgtcgtggggcccactgatcccatcttggccacggttggagaaaacactacgttacgctgccatctgtcacccgagaaaaatgctgaggacatggaggtgcggtggttccggtctcagttctcccccgcagtgtttgtgtataaaggtggcagagagagaacagaggagcagatggaggagtaccgaggaagaaccacctttgtgagcaaagacatcagcaggggcagcgtggccctggtcatacacaacatcacagcccaggaaaacggcacctaccgctgttacttccaagaaggcaggtcctacgatgaggccatcctgcacctcgtagtggcaggactaggctctaagcccctcatttcaatgaggggccatgaagacgggggcatccggctggagtgcatatctagagggtggtacccaaagcccctcacagtgtggagggacccctacggtggggttgcgcctgccctgaaagaggtctccatgcctgatgcagacggcctcttcatggtcaccacggctgtgatcatcagagacaagtctgtgaggaacatgtcctgctctatcaacaacaccctgctcggccagaagaaagaaagtgtcatttttattccagaatcctttatgcccagtgtgtctccctgtgcagtggccctgcctatcattgtggttattctgatgatacccattgccgtatgcatctattggatcaacaaactccaaaaggaaaaaaagattctgtcaggggaaaaggagtttgaacgggaaacaagagaaattgctctaaaggaactggagaaagaacgtgtgcaaaaagaggaagaacttcaagtaaaagagaaacttcaagaagaattgcgatggagaagaacattcttacatgctgttgatgtggtcctggatccagacaccgctcatcccgatctcttcctgtcagaggaccggagaagtgtgagaaggtgccccttcaggcacctaggggagagcgtgcctgacaacccagagagattcgacagtcagccttgtgtcctaggccgggagagcttcgcttcagggaaacattactgggaggtggaggtggaaaacgtgattgagtggactgtgggggtctgtagagacagtgttgagaggaaaggggaggtcctgctgattcctcagaatggcttctggaccttggagatgcataaagggcaataccgggccgtgtcctcccctgataggattctccctttgaaggagtccctttgccgggtgggcgtcttcctggactatgaagctggagatgtctccttctacaacatgagggacagatcgcacatctacacatgtccccgttcagccttttccgtgcctgtgaggcccttcttcaggttggggtgtgaggacagccccatcttcatctgccctgcactcacaggagccaatggggtcacggtgcctgaagagggcctgacacttcacagagtggggacccaccagagcctatagaatcaattccttggtctcacagccatgtagacaagccctggtcatctcagcagccaccgcacaacacccctggtggaagacacgccctcctcccctctggtcacacaagagaacatcttccagctgcctctttcacacccactacagacctcagccccagttttctcctcctcactaggctgtgtttttagtagttcctttgcttgtaactatggggtgggatccaggcatagggaactagttgttacacagctcccagccaagaagaaagtgtgagaagttgatgggcagcaaacctgctgtttaacatcagggtgaccacattaagcccagtattccagttggcaccagaagatatggacttggaatgaggcctacagggttcaccaggatgtaagaggagagaggaatccacaggaccaccagagaggagagggaaccagatatgcagatcagagatagaggaagtggaaccagagagctgggagggaccaaggttgtaagggtggctaagtcccaccataacagctaaggggacctgggagatgatggctcatttccacccagccccaggatttccagagcgcacatccacaggcctggacctgggatgaagatgaatgaagaacatggatgcacgtggatgtagtttggctcaggtgtccctgcagttggcaaggagtcagtactcagtccctgagtgtggctgaaatttgaggtcctggctgagccaaggagtaatggaccagatctacctcagtattcaagttcagtggggacaccagtggcttcaaacttcctggtttcatgatatcttgagacgccttacaaatgatggaggattccaaagagtttttgtttatttgggttaatatttgttggtatttatggcatttgagattgaaactaagaaatgttttaatttattacctttacaacatttatttacattacatacatacatttacaacatttattaatttatattaaaatagcatgaataagccaattataggttaatataagtagaatgtttgtgaaaaataagtatggtatccaaagcaaaataaattttattgtgaagtgtgaaaaaa

SEQ ID NO: 654 - DNA, 2543 bp, Homo sapiens
  misc_feature: Incyte ID No: 1450758CB1
ggcaccgagacacaaaggcaggcgggatgcgggagcaggcaaagggaaagcgaaagccgcgcgcccggccggtgactgggtgaaggcgccgcgcagctttcccgacgccggctgtacccggacctcctggtcgagcctggcgcgccgcagccatggccatcgctcaactggccacggagtacgtgttctcggatttcttgctgaaggagcccacggagcccaagttcaaggggctgcgactggagctggctgtggacaagatggtcacgtgcattgcggtggggctgcccctgctgctcatctcgctggccttcgcgcaggagatctcgattggtacacagataagctgtttctctccaagttctttctcctggcgtcaggctgcctttgtggattcatattgctgggcggctgttcagcagaagaactcactgcagagcgagtctggaaacctcccactgtggctgcataagtttttcccctacatcctgctgctctttgcgatcctcctgtacctgcccccgctgttctggcgtttcgcagctgctcctcatatttgctcagacttgaagtttatcatggaagaacttgacaaagtttacaaccgtgcaattaaggctgcaaagagtgcgcgtgaccttgacatgagagatggagcctgctcagttccaggtgttaccgagaacttagggcaaagtttgtgggaggtatctgaaagccacttcaagtacccaattgtggagcagtacttgaagacaaagaaaaattctaataatttaatcatcaagtacattagctgccgcctgctgacactcatcattatactgttagcgtgtatctacctgggctattacttcagcctctcctcactctcagacgagtttgtgtgcagcatcaaatcagggatcctgagaaacgacagcaccgtgcccgatcagtttcagtgcaaactcattgccgtgggcatcttccagttgctcagtgtcattaaccttgtggtttatgtcctgctggctcccgtggttgtctacacgctgtttgttccattccgacagaagacagatgttctcaaagtgtacgaaatcctccccacttttgatgttctgcatttcaaatctgaagggtacaacgatttgagcctctacaatctcttcttggaggaaaatataagtgaggtcaagtcatacaagtgtcttaaggtactggagaatattaagagcagtggtcaggggatcgacccaatgctactcctgacaaaccttggcatgatcaagatggatgttgttgatggcaaaactcccatgtctgcagagatgagagaggagcaggggaaccagacggcagagctccaaggtatgaacatagacagtgaaactaaagcaaataatggagagaagaatgcccgacagagacttctggattcttcttgctgatgatttttttccttgagctgtaaatctgtgacttctgcgacatgggatttaatttggctaaagcacccctgttggtttcacagctggtttgcaataaatggttcttggtggagatactgagcatgtcttattgagtccctaatggaaatggtgatcaacaaaaggttatggaagaatggtttatgaacttcccataggaagcacctgagagatagtaaactgcagcaagtaactatgtgtaagtcctcatcaaatgaaaagcagaaagacaagaacaattagtcaagagcagtagccctgtcagagcctcggagcaatacctttctgtacccgtggtgagacaagacccagagctactggaaaacaagcactttggaagatttgttttgttttcatggaataataatatgtcagggtataatttaacgtgagtttcttatgtgcccttaaagactgttagacaagaaaagcattcactggctaataatccataggtcgacctatgtcctaagttaggtgtaaggtccgatgccttggcccacactcgagctctctttacattgttagttgtcaaccttggctgatggaaatcccgtaaccactatttgttgcactgtgccttgaagggcagcaggcccaagtgctgctctgactgaaaactgagttaacaagatgaaatctaaaggatattcacagtgacttcaattcaggaagaatgcttccaaaagagcccagtggggaaatctgacatcacagaagacattaattcagtcactttcaaagagtttgtctacaggcggtttctctgttatcaaaggcatttgaaataggattttacttaaacaataatggaacacaggagtatttaaagtgaagaacactttgcctgaatgtgatcagggcacataagtgacattggcatgcttcatatggcgtgcttggagccagaaaaacttagcggtttattttgtttatatttaagcacagctttaaaaaattcattatcgtttattcagtgtccgaattgaggccatttgggaagaaaattctagcactggtggagaattatagaataaagattataaatggttggataaaaaaaaaaaaaaa

SEQ ID NO: 655 - DNA, 1913 bp, Homo sapiens
  misc_feature: Incyte ID No: 399074.2
caagaccttcgagaaatgcatcattgaagccgtgagctcagcctgccagtctcagaccagtatccttcaggggttctcttactctgatttgcggaaatttggcatcgtcttgtctgctgtgatcactaagtcctggcctaggaccacggacaacttcgatgacattttaaagcatctgctcacgttggcagatgtcaagcacgtcttcagattgtgtggaaccgacgagaaaatactagcaaatgtcacagaggatgccaagaggctgatagctgttgccgactctgtgttgacgaaagttgttggtgacctcctaagtggcacgattttagttggacaactggagctgattataaagcacaagaatcagtttcttgacatctggcaactgagggaaaaaagtctttcaccccaggatgaaaaatgtgctgtggaggaagcactggattggagaagggaggaactgttacttctaaagaaagagaaaagatgtgttgatagtctcctgaagatgtgtgggaacgtgaaacatctgatacaagtggactttggagtgcttgcagtaagacactcacaagacctcagcagtaaaagattaaatgacaccatgacagtgagactgtccacctcctcgaactcgcagagggcaacgcattaccacctgagctcccaggtccaagaaatggctgggaagatagacttgctcagagacagccacatcttccagctcttctggcgggaagccgcagagccgctgagtgagcctaaggaggaccaggaagccgcagagttgctgagtgagcccgaagaagaatcagaaaggcacatccttgagcttcaagaggtgtatgactatttgtatcagccttcttacagaaagttcattaagttgcaccaggatctaaagtcaggagaggtcacccttgcagagattgatgtcatcttcaaggactttgtgaataaatacacggacctggattcagaacttaagatcatgtgcaccgtggaccaccagggccaaagagattggatcaaggaccgagtggaacagatcaaggaataccatcacctgcaccaggctgtccacgcagccaaggtcatcttgcaggtcaaagagagcctgggactgaacggtgacttcagtgttctcaacactttactaaattttactgataacttcgacgactttcgccgtgaaacactggaccagatcaaccaggagctcatccaggccaaaaagctgctccaggacatcagcgaggcccggtgcaaggggctgcaggctctgtccctgagaaaggagttcatctgctgggtccgggaggctcttggaggcatcaatgagctgaaggtgtttgtggacctggcctccatctcagcgggggagaatgacattgatgtggaccgggtggcctgcttccatgacgctgtgcagggctacgcatccctgctatttaagctggaccccagcgtggacttcagtgcattcatgaagcatctgaaaaagctgtggaaggctctggataaggaccagtacctgcccaggaaactggtgagtcttattctgtctctaatgcagattttgttgaatagagcattgcttagcaacgttagggcagtgactgtggaaatggtggcacacctgtgtggtaggtttgtacacagccgttttcaatgatatttaaaaagcttttcttcataaatggaaattcaccatcttgttacctagaaagcaggatacaaaattacatgacacatagtaatctctaaggtgcaaaacacacgtggaaaaaagacagaagggaaatatgctgaaacgttgccaggagttttctctgaatggttgtaattgtcattttattctgttactttttgttattttctataattgatagaattttttatcagaaaat

SEQ ID NO: 656 - DNA, 4040 bp, Homo sapiens
  misc_feature: Incyte ID No: 340479.3
taatacagcaactctctcccaaagaacagagagcttttgagcttaaattgaaagaaatcaaagaacagcataaaaactttgaggatttttattcctttatgatcatgaaaaccaattttaataaagaatacatagaaaatgtggtccggaatatcctgaaagggcagaatattttcaccaaggaagcaaagctcttttcttttctggctcttcttaattcatatgtgcctgataccaccatttcactatcacagtgtgaaaaattcttaggaatggaaacaagaaggctttctgggggacagaaaaatttgaagacaagatgggcacctactctacaattctgataaaaacagaggtcatcgaatgtgggaactactgtggagtacgcatcattcactctttgattgcagagttctcactggaagaattgaagaaaagctatcacctgaataaaagtcaaattatgttggatatgctaactgagaatttgttcttcgatactggtatgggaaaaagtaaatttttgcaagatatgcacacactcctactcacaagacaccgcgatgaacatgaaggtgaaacaggaaattggttttccccatttattgaagcattacataaagatgaaggaaatgaagcagttgaagctgtattgcttgaaagtatccatcggttcaacccaaatgcattcatttgccaagcgttggcaagacatttctacattaaaaagaaggactttggcaatgctctaaactgggcaaaacaagcaaaaatcatagaacctgacaattcttatatctcagatacactgggtcaagtctacaaaagtaaaataagatggtggatagaggaaaacggaggaaacgggaacatttcagttgatgatctaattgctcttttggatttagcagaacatgcctcaagtgcattcaaagaatctcaacagcaaagtgaagatagagagtatgaagtgaaggaaagattgtatccgaagtcaaaaaggcggtatgatacttacaatatagctggttatcaaggagagatagaagttgggctttacacaatccaaattctccagctcattcctttttttgataataaaaatgagctatctaaaagatatatggtcaattttgtatcaggaagtagtgatattccaggggatccaaacaatgaatataaattagccctcaaaaactatattccttatttaactaaattgaaattttctttgaaaaagtcctttgatttttttgatgaatactttgtcctgctaaaacccaggaacaatattaagcaaaatgaagaggccaaaactcggagaaaggtggctggatattttaagaaatatgtagatatattttgtctcttagaagaatcacaaaacaacacaggtcttggatcaaagttcagtgagccacttcaagtagagagatgcaggagaaacctagtagctttaaaagcagacaagttttctgggctcttggaatatcttatcaaaagtcaagaggatgctataagcactatgaaatgtatagtgaacgaatatacttttctcttagaacaatgcactgtcaaaatccagtcaaaagaaaagctaaatttcatcttggccaacattattctctcctgtatccaacctacctccagattagtaaagccagttgaaaaactaaaagatcagcttcgagaagtcttgcaaccaataggactgacttatcagttttcagaaccgtattttctagcttccctcttattctggccagaaaatcaacaactagatcaacattctgaacaaatgaaagagtatgctcaagcactaaaaaattctttcaaggggcaatataaacatatgcatcgtacaaagcaaccaattgcatatttctttcttggaaaaggtaaaagactggaaagacttgttcacaaaggaaaaattgaccagtgctttaagaagacaccagatattaattccttgtggcagagtggagatgtgtggaaggaggaaaaagtccaagaacttttgcttcgtttacaaggtcgagctgaaaacaattgtttatatatagaatatggaatcaatgaaaaaatcacaatacccatcactcccgcttttttaggtcaacttagaagtggcagaagcatagagaaggtgtctttttacctgggattttccattggaggcccacttgcttatgacattgaaattgtttaagagcctgatattcttcctccaagaatttgatctcagtacccatttaatttttttggactcaagatctatgctttaaaccggcaaggttatagatacagcctctagctcttcagatctgtacatgcagtatttaatttcctcttaaacatgttatgagttctacaaagacaatagtgaaaaaggaaggagtgagatatatgaaaagtagcaaatatgttccttggtttggttaacatcattgatgacaaaataataaggagctatgactggagtcaggagaagttagtgtaataagctggctacacagaaccccactacttaccaggcatggattgaagaagattgtctactcaaatggcatttagacattagaatgtctgggaaaatatttctcaaagacagcaaaaacctctcaaactgaggagcaacatttattcttactaagcagatcatcaatgtatcatgtgcttggcactcaaggatcttccaaaacagaggaccaaccagtcttctgaaggtcatgcccacagaagtcatcagaccttaccaaagtaggttggagaattagattgccttttcatgcagtgagattcagttaagcaaaaatgaaatttgtctctatagctaattagcttatcaactcccctccaaacaaacaattaaaaaaaaaacatacagacactcaaattccacaagctaatgaacaaaagggactcttgtgagaagactaatgagtccctcatccagaagatgccaatgtactggcagattaacatacaacctatgttttgaacaaaaacaaccagcgatacgtaatcaaaatgtaattttcccctaataaaattatggatatgggcagtcatcaatggctgccaaaaccattaagtggaaagctgattaaaaaacaaaaatttctaatggatttatcaaactgtcccaaatcctgataaatattaacatcacagaggaagaccagacattatgggcctggaagtactataggagtgcacacatcacccgtgacatggtcttgccaaataattaaacctgaatttgatcaggtctctggatcttatttgcaattcaaaagaaattttaaaaaaatcctactaacaccaccacaaatatgcaatcagcaatatccagaaaggggaaattcacaggacaaaaacctggttttcttttttggtttcttcaaccaaaaaagaaagaaattgcaaaggaccaaaaaaatgttggggaatctatacattataagggacttaacaactaaagggcaacatatagactttagatcctaatttgagcaaaatctaaaatcaattattaggcaatcagaaaaatttgaacacagactagatatttgaggatattaaggtactatattattgaagattccatggttatgttttttaaagagttcatgccttttagagatacatactaaagtatttgtaaataaatgacatgatctagaatcagtaattttgtgtttggggtgtgggggtggtgaaagggaagtagaaccgaaacaagattagtcctgagttaacaatggctgcaagctggatacatggaattcagcacacttttctccctcttactgattatgcttttgaaattttctcttgtaaaacatttagaaaacaaaaacaaaaaaaatgtgatttgtttctgtcttcaaaatctcattagaattttttcactggaggaagattttcccttgcttctgcataaaattttaactccataacttataagctcactctttattgttactttctaattgacaaataaaaattgtatattattagaaaaataaaaaaaa

SEQ ID NO: 657 - DNA, 2243 bp, Homo sapiens
  misc_feature: Incyte ID No: 330879.1
gtcaaattgcattgaatatattagaagagaatttattctatgattctggaataggaagagacaaatttcaacatgatgttcaaactcttctgcttacaagacagcgcaaggtgtatggagatgaaacagacactctgttttccccattaatggaagctttacagaataaagacattgaaaaggtcttgagtgcaggaagtagacgattcccacaaaatgcattcatttgtcaagccttagcaagacatttctacattaaagagaaggactttaacacagctctggactgggcacgtcaggccaaaatgaaagcacctaaaaattcctatatttcagatacactaggtcaagtctacaaaagtgaaatcaaatggtggttggatgggaacaaaaactgtaggagcattactgttaatgacctaacacatctcctagaagctgcggaaaaagcctcaagagctttcaaagaatcccaaaggcaaactgatagtaaaaactatgaaaccgagaactggtcaccacagaagtcccagagacgatatgacatgtataacacagcttgtttcttgggtgaaatagaagttggtctttacactatccagattcttcagctcactccctttttccacaaagaaaatgaattatccaaaaaacatatggtgcaatttttatcaggaaagtggaccattcctcctgatcccagaaatgaatgttatttggctcttagcaagttcacatcccacctaaaaaaatttacaatcagatctgaaaaggtgctttgacttttttattgattatatggttcttctgaaaatgaggtatacccaaaaagaaattgcagaaatcatgttaagcaagaaagtcagtcgttgtttcaggaaatacacagaacttttctgtcatttggatccatgtctattacaaagtaaagagagtcaattactccaggaggagaattgcaggaaaaagctagaagctctgagagcagataggtttgctggactcttggaatatcttaatccaaactacaaagatgctaccaccatggaaagtatagtgaatgaatatgccttcctactgcagcaaaactcaaaaaagcccatgacaaatgagaaacaaaattccattttggccaacattattctgagttgtctaaagcccaactccaagttaattcaaccacttaccacgctaaaaaaacaactccgagaggtcttgcaatttgtaggactaagtcatcaatatccaggtccttatttcttggcctgcctcctgttctggccagaaaatcaagagctagatcaagattccaaactaatagaaaagtatgtttcatccttaaatagatccttcaggggacagtacaagcgcatgtgcaggtccaagcaggcaagcacacttttctatctgggcaaaaggaagggtctaaacagtattgttcacaaggccaaaatagagcagtactttgataaagcacaaaatacaaattccctctggcacagtggggatgtgtggaaaaaaaatgaagtcaaagacctcctgcgtcgtctaactggtcaggctgaaggcaagctaatctctgtagaatatggaacagaggaaaaaataaaaataccagtaatatctgtttattcaggtccactcagaagtggtaggaacatagaaagagtgtctttctacctaggattttccattgaaggccctctggcatatgatatagaagtaatttaagacaatacatcacctgtagttcaaatacgtttatttatatctttatgattttattctctctctctattctcatggcactttcataacattatggctaacctctaattacagattttgcttttgcctccctgaatgaattacaagcctttttaagatatgaaatatgcctacccgcagagcttggcacaaagtggagtcaatcttttaatgttttaaatatgcattttcagactcaaataattaagaagtttcattgatatccactggtcacatcataactgtctatagggcaataaaatctgtgttaaactcaattgcttttataagttttctaaattatttcttcactgtgacagcaaagatttaaataagatgaatgtaaaagagaaagcttattggactcaaacccacagatccacaccagagttctatttacctcatcttggtatcaataaaaacttatgtggaaggtaaatatattgttccccatccaccacataacactctcccca

SEQ ID NO: 658 - DNA, 1001 bp, Homo sapiens
  misc_feature: Incyte ID No: 899263.1
agaattcaaagtatgagcaaggataccaaaaatcacatcctactatacagttgttttggaaggctttccacaaactaaccttggatgaaaagaaaaaattcctctttttccttacaggacgtgataggctgcatgcaagaggcatacagaaaatggaaatagtatttcgctgtcctgaaactttcagtgaaagagatcacccaacatcaataacttgtcataatattctctccctccctaagtattctacaatggaaagaatggaggaagcacttcaagtagccatcaacaacaacagaggatttgtctcacccatgctcacacagtcataatcacctctgagagactcagggtgggctttctcacacttggatccttctgttcttccttacacctaaataatacaagagattaatgaatagtggttagaagtagttgagggagagattgggggaatggggagatgatgatgatggtcaaagggtgcaaaatctcacacaagactgaggcaggagaatagggtacagagatagggatctaaggatgacttggacacactccctggcactgaagagtctgaacactggcctgtgattggtccattccaggaccttcatttgcataaggtatcaaaccacatcagcctctgattggccatgggccagacctgcactctggccaatgattggttcattccaggacattcatttgcataaggagtcaaaccacaccagtcttggattggctgtgagccaattcacctcagtctctaattggctgtgagtcagtctttcatttacatagggtgtaaccatcaagaaacctctacagggtacttaagccccagaagattttgctaccagggctcttgagccacttgctctagcccactcccaccctgtggaatgtactttcacttttgctgcttcactgccttgtgctccaataaatccactccttcaccacccaataaaaaagaaaaatgaaaaagaaaggggggg

SEQ ID NO: 659 - DNA, 2132 bp, Homo sapiens
  misc_feature: Incyte ID No: 233104.1
  unsure 281, 287, 326, 601-624: a, t, c, g, or other
gtttcccaaaaccctgcgcggccggctttgaccgcgctaagatggcgactcccatgcatcggctaatagcccggagacaagcattcgacacagagttgcagcctgtcaagaccttttggatcctgattcagccatccatcgttattagtgaagcaaataagcaacatgtaagatgtcagaaatgcttggaatttggacattggacttatgaatgcacaggaaaaagaaaatacctacataggccctcaaggacagcagaactaaagaaagctttaaaaganaaaganaacagattattattgcaacaaagcattggagaaaccaangtagaaagaaaggccaagaaaaaaaggtctaagagtgtaaccagttccagtagcagtagcagtgacagttctgccagtgattcttcatcagagagtgaagaaacatctacctcttcctcctcagaggacagtgacactgatgaaagctcctctagttcctcatcctcagcctcctccacaagcctcttcctcctcctctgattcagactcagattccagctcttccagtagcagtagcaccagcacagatagcagctctgacgatgaaccaccannnnnnnnnnnnnnnnnnnnnnnnttgctccattcatattggactgatggactgaaaacattgatgtgattcttgaaagggaatttagaatatgttaaggccaagtaggttaactggtgaacatttctagaattcaaaagtttctaaatgttttacattgtaagagcatagagaatattaataatggcttatagagagagacttttatttgaagggtgaatcttgttttttttatctttaaaatatatctctagaacttaaagctgaaatctgcaaatctgtttgtgtgatgaaactatcttttctctctgtgaaataaatgccatactttgttatatatgttagtggtatgtatcagacatattttcaggatggtgcgtcaggatatctggcagtggatttctaatgcttttggctgtatgttatgtaagatttaatatgttgttactgtaagcttaggagttttcctactattaataaatgtgctctatttttacatttatgttcagaaagttatctgactttttgtcctaagtggtatgttcaaggagcctattaatatatttatagtttttgaatgctgtaagtttcaaattgctgtgttacgtcattcattttcttctggttccttaagtttttcaagttatccttttctgaggaaaattattctagaggaacctaaaaagggacaaaaaaattgaaacttcttaggagtctaatcttggtgccttctgttaaaagtcagtgtatcagaaaagaaagcagccatgtaagaggctaacttaagtagaagtgctagaaatatctttgtgtattaacatgcaataaaaggtaccattcaaagcagggggaaaggtaggaagaagaggtaatttttactgaaaattagggcaatgttggtcgccttttattaaaagctttttttaagctttcataaagattgctttttgctatttttgaaaatatggtattatagtttgtatggtaactggtcatatatgacagtctactgcatatatatgaatgactaggattaatctggtgtgtttacataggatatacatagttgaaatctagcatgaaaagttaaaaaggagatactgcacaatatttcttaaaagtaaaatgctgttattgtgatgagtctttggtttaacatcacagaatactgtgatgtctttttaaccttttggaaagaggtatcatttgtagaaaaaattacttttgaagaaaacaggctatttaaatattgaaatatatgtatgttgtgagtttaaggagcctgtaattgtcagttttacaaaaccatctgtgttcaatggttgtaaataaattctcaaaacatcatttcaaaggctgcctacagaatattatcacttgacagatagagttaataaattaccaatcaggcacattttataatgtttgtctctgtaaaggtaatattagcagttaaagaacacggatgagaaaagaatgtgttacataggttgcatcacttgcagttaaataaaactcacaatttgtgctca

SEQ ID NO: 660 - DNA, 623 bp, Homo sapiens
  misc_feature: Incyte ID No: 233720.12
gtcatgcaggcaagatggcggaaggggaggacgtgggatggtggcggagctgggctgcagcagagctaccaagcagtcaaagagaagtcctctgaagccttggagtttatgaagcgggacctgacggagtttacccaggtggtgcagcatgacacggcctgtaccatcgcagccacggccagcgtggtcaaggagaagctggctattgcagcctgttcccggggcgcttgcttcctctgcccgttctctatacagacggaaggctcctcaggagcaacagagaagatgaagaaagggttatctgacttcctaggggtgatctcagacacctttgccccttcgccagacaaaaccatcgactgcgatgtcatcaccctgatgggcacaccgtctggcacagctgagccctatgatggcaccaaggctcgcctctatagcctgcagtcggacccagcaacctactgtaatgaaccagatgggcccccggaattgtttgacgcctggctttcccagttctgcttggaggagaagaagggggagatctcagagctccttgtagcagcccctccatccgggccctctacaccaagatggttccagcagctgtttccattcagaattct

SEQ ID NO: 661 - DNA, 3180 bp, Homo sapiens
  misc_feature: Incyte ID No: 233720.7
gtgatgtcatgcaggcaagatggcggaaggggaggacgtgggatggtggcggagctgggctgcagcagagctaccaagcagtcaaagagaagtcctctgaagccttggagtttatgaagcgggacctgacggagtttacccaggtggtgcagcatgacacggcctgtaccatcgcagccacggccagcgtggtcaaggagaagctggctacggaaggctcctcaggagcaacagagaagatgaagaaagggttatctgacttcctaggggtgatctcagacacctttgccccttcgccagacaaaaccatcgactgcgatgtcatcaccctgatgggcacaccgtctggcacagctgagccctatgatggcaccaaggctcgcctctatagcctgcagtcggacccagcaacctactgtaatgaaccagatgggcccccggaattgtttgacgcctggctttcccagttctgcttggaggagaagaagggggagatctcagagctccttgtaggcagcccctccatccgggccctctacaccaagatggttccagcagctgtttcccattcagaattctggcatcggtatttctataaagtccatcagttagagcaggagcaggcccggagggacgccctgaagcagcgggcggaacagagcatctctgaagagcccggctgggaggaggaggaagaggagctcatgggcatttcacccatatctccaaaagaggcaaaggttcctgtggccaaaatttctacattccctgaaggagaacctggcccccagagcccctgtgaagagaatctggtgacttcagttgagcccccagcagaggtgactccatcagagagcagtgagagcatctccctcgtgacacagatcgccaacccggccactgcacctgaggcacgagtgctacccaaggacctgtcccaaaagctgctagaggcatccttggaggaacagggcctggctgtggatgtgggtgagactggaccctcaccccctattcactccaagcccctaacgcctgctggccacaccggcggcccagagcccaggcctccagccagagtagagactctgagggaggaggcgcccacagacttacgggtgtttgagctgaactcggatagtgggaagtctacaccctccaacaatggaaagaaaggctcaagcacggacatcagtgaggactgggagaaagactttgacttggacatgactgaagaggaggtgcagatggcactttccaaagtggatgcctccggggagctggaagatgtagagtgggaggactgggagtgagggagccagagggagcagctcccccacccatggcatctctcgcctccctcgctcgtctcagcccagccctggaagactgagaatgttcccccaaatctcctctgccaaccagagctctgggcacagattctggtggctccctgctggccctcttgggcctctgctcacacctgggaaggggctctctaaatcccggccagaaactctgacttgtgccaacaataggatgacccaagggagaggaaacctatcctcctcaccagaagagcctgtgtttttctgctgaacacccactgttcctgaggactcctgctgggaagtcccaagggatagttctagcccttctgcctgtgtagacagaagctaaaccaccagtctctctcggaggaagctgagacaacatactctgtccatacataagcaggcagggagggccatgccacctacccttggctaaacagggacagtgaacacattttggttcctatcccagtgggtaagaggcacttatctctgggaaatttgcctctcttgggactctccccctcccaggcattttccattcctggaaaggctcctttggggttcagaatccagagaccaaaccctgacccacctccttcctttcctccagcccacgctggtctgtccccatgccttcccagggcttcttcatgtcagatgcacccaagtccttagcccagctgtgccacctgcaggagttcgctcttgcgtttcttcccctccccaagaagggagggggctacttcaggcccttctgtgtgttgcctggcaggataccttgtccaaccagctacccacctcaactcccctgtagtttaggacacaaaacagctaccagcggtacagagcggtgatcaaagccgagtacttacaactctggtaagcctagcttctccgcctcagcccttctgcttctggaagggctatcctgggggtgaacttgaaactctcatcaggcttctgcaaaagctcttcttcctgaagacagacccagcctttgtgctctcaccctccactctggtaaagctgcacctctgggggaatgaggggctgcaggaatctctggagagcctggtgcttcacgatgctgctctggtgattcttgtacctaatctggtgtgctcaccaatgagtgaaagggatcgtgggtcagggacaccgagagagtgaggtcacttccacttcaaaccttcagtgagggggtgggatggagagaatgctgaatcttttttttgacgggatggggtttttctctttgtaattatttctttagtttaattaaccttttggttgtttgtgcaatattatatattttaaattataatgcatctccccagagtattttgtagctgggaaaagaaaaaaggaaaaaaagaaaaaaagattctaacagctgttagttttataattaaaaaagaaagaaaaaagaactttgtcctgaaccttttacagacttgccgttaacagcattaaagtgattcacccgaagctgaaaggtgtctgggggtctgtttttgtccccttggcagctgcactgggccagggcaggactggcttcccacttggagccagagacagggtagggggatagcctaggtccagaggacgtaccttgtcctcatcccagattcagctttgcctttgggatgagaaagggtcagggctcgcaacaggcctctcactgggacaaggagtcgggaggccatctctgcactcccagtgcctctgctttcctttggaaaggaagttgcaacaagaatggcttcagttgctcttggtcatttttatcctctcttccccctgtttgtatatgattcttgggtctattttaattaactttagt

SEQ ID NO: 662 - DNA, 1941 bp, Homo sapiens
  misc_feature: Incyte ID No: 228899.18
cgcaggaccgcgggcatttacccgtgctttcccaagcctggaagaactcgtcatgctctttgtagcgtggtgcttctgttgctcacaggatgtttgccacacgagtcactcgagagaatctctgagtcctggcgagggctttctgaggcttcgtgtattagcagctgttgtcttccaactcagcggcaggacaacttgcctttgatgattttcaagagagttgtgctatgatgtggcaaaagtatgcaggaagcaggcggtcaatgcctctgggagcaaggatccttttccacggtgtgttctatgccgggggctttgccattgtgtattacctcattcaaaagtttcattccagggctttatattacaagttggcagtggagcagctgcagagccatcccgaggcacaggaagctctgggccctcctctcaacatccattatctcaagctcatcgacagggaaaacttcgtggacattgttgatgccaagttgaagattcctgtctctggatccaaatcagagggccttctctacgtccactcatccagaggtggcccctttcagaggtggcaccttgacgaggtctttttagagctcaaggatggtcagcagattcctgtgttcaagctcagtggggaaaacggtgatgaagtgaaaaaggagtagagacgacccagaagacccagcttgcttctagtccatccttccctcatctctaccatatggccactggggtggtggcccatctcagtgacagacactcctgcaacccagttttccagccaccagtgggatgatgttgcacctggacttgatatgaaagtaaccatcagaaaatcaacagagatcttaaacttgcctaccacagacacctgcaggaatatactaagaatcatcatagtggacctttattgtctcctgagcacccattctttgttctttcagaaacacaactggttttgagaatccatcccttcttcactcagtccacgtaaaggttaggatggtagaaagtgttatacctcttcctccagagttggagcctatgacactgatgacactggcatggaaagccaaagccctacaccaaccagcacacttactggttccaaattgatctacgctggtgtaatcagagtgaatctcagaactttggacagagctgtgagcagagactgactttcctgctgtctccaggtagctgcaaggctgaacagcagcacctactttattaccatcttactgtcattcaaagaaggcagagctgaatgctggagaaaaactgagtaccagcaacagtttttgaaccctgaatattgtcataactgaagctagaattatccctggacttgtttgccactaaaatttccttgttttgcttaccctggtttcagctggcaccctgatcacttgaaaggaacataactgatatactgtcctttgtttttctttccttcctcttctctgcctttgatgattttaaattagaaatctacctgcctctaatctctttaattttctcatttatttactgctgcctattttccaaaacactgcttttcgaatattcctggctcaaaaatctatgtcttcatgacatatgaaacccctagaatccagcctttccccagcttttaatatctcctaattgatttctcaattccagtgaaatgattccatttatttttttcccaaacacatcacaaatattcctaactcttgtgagcaattttgtctcattcttctcaacttatctaaatcctaacttttcaaaagatctagctcaagttctgtcttatcatattttgagttcctttctttggcattgtattattttgtatctttccatgtacacatgtgtgcattatctccctgataaaactaactggctagaggataggagtaaagactcaattctaatatccttgttacctaataa

SEQ ID NO: 663 - DNA, 3180 bp, Homo sapiens
  misc_feature: Incyte ID No: 903616.2
tgcgtaacagggcttgacagcgcgcggaagaaaaaccagcaagaaggcggcgggggaagatggcggtcctggggtagagtttgcaagctttctgactaggctagtcgagtaactattcgggtcatggcgtcaaactcaactaagtctttcctggcagatgccggctatggcgaacaggaactggatgccaactctgcccttatggaattggacaaaggcctaagatctggcaaacttggtgaacagtgtgaagcagttgttcgctttcccagactttttcagaagtatccattccctattcttatcaattctgcattcctaaagttagctgatgttttcagagttggaaataatttcctgaggctatgtgttcttaaagttacccaacaaagtgagaaacatttggagaagattctaaatgtggatgaatttgtgaagagaattttttctgtgattcatagtaatgatcctgtggcaagagccatcaccctccggatgttgggaagtctggcatcaataattcctgagaggaagaatgctcatcatagtattcgtcagagtttagattcacatgataatgtagaagttgaagctgctgtttttgctgctgcaaacttctctgcacagtcaaaggattttgctgtaggaatctgtaacaaaatcagtgaaatgattcaaggtttagcgacaccagtagacttgaagctaaaattgatacccattctacagcacatgcaccatgatgcaatcttggcttccagtgctcgtcagcttttacaacagctggtcacatcctatccgtccaccaaaatggtgattgtgtctttgcacactttcactctgcttgcagcgtcatctttggttgatacacctaagcagattcagcttctgttgcagtatttgaagaatgatcccaggaaggcagtaaagagacttgctattcaagatctgaaattacttgctaataaaacaccacatacttggagtagggagaatattcaggcactttgtgagtgtgccctccagactccttatgacagcttaaaactagggatgttgtctgtcctttccacactatcagggaccatcgccatcaaacattacttcagtatagttccaggaaatgtgagttcttctcccagatcttctgatttagtcaaattagcccaagagtgctgttaccataataacaggggcattgcagctcatggagttagagtcctaactaatataactgtttcttgtcaagaaaaggatcttttggcactggaacaagatgctgtctttggcctgaatccctactggtactttgtagtcaagatgatagtccaggtgctcaggccactttaaagattgctctaaactgtatggtgaagttggccaagggcaggccccatcttagccagtcagtagttgagaccttgttgactcaattgcacagtgctcaagacgctgcccggattttgatgtgccattgcctggcagccattgccatgcaactgccggtgctgggtgatgggatgcttggtgacctcatggagctgtacaaggtgattggacgatcagccacagacaagcaacaagaacttctggtgagtttggctactgtgatttttgttgcaagtcagaaggcattgtctgtggaaagtaaggcagtaattaagcagcagcttgaaagtgtctccaatggatggactgtataccgtattgccagacaggcttccagaatgggtaatcatgacatggccaaagagctttatcagagtttgctgactcaggttgcctcagaacatttctacttctggctaaatagtttgaaggagttttcacatgcagaacagtgtctcactgggttgcaagaggaaaattatagttcagcactttcttgcattgctgaatctttaaaattctatcacaaagggattgcttccttaacagcagctagtacaccactgaatcctttaagctttcagtgtgaatttgtaaaactcaggattgaccttttacaagccttctctcaacttatctgtacttgtaatagcctgaagacaagcccaccacctgcaattgccacaacaattgccatgaccttaggaaatgacctccagaggtgtggtcgcatctccaatcagatgaaacagtccatggaagaatttcgaagccttgcttctcgatatggagatctttaccaggcatcttttgatgctgactcagcaactttgaggaatgttgaactacagcagcagagctgtttactgatatctcatgcaatagaagccctgattttggatccagaatcagcaagtttccaggaatatggatctactggaacagcccatgctgatagtgaatatgaaagaagaatgatgtctgtatataatcatgtcttggaggaggtagaatcactcaatcggaaatatacccctgtttcttatatgcacacagcatgcctctgcaatgccatcattgctttgctgaaagttcccctttctttccagagatattttttccagaaactacagtctaccagcatcaagcttgctctgtcaccatcgccccggaatcctgcagagcccattgctgtccagaataaccagcagctggcgctaaaggtagagggagtggttcagcacggatctaaaccaggactcttccgcaaaattcagtctgtctgtctgaatgtttcttccacactgcagagtaaatctggacaagactacaagatacccattgacaacatgaccaatgagatggagcaaagggttgaacctcataatgattacttcagtactcaatttctgttgaactttgctatccttggaacacacaacattacagtggaatcttctgtgaaagatgccaatggtatagtatggaagactggtcccagaactaccatatttgtaaaatccctggaagacccttattcccagcaaattcgcttacaacagcagcaagcccagcagccattacagcagcagcagcaacgcaatgcctacacacggttttaaccatggaatgaatgcactgcagactctcaagagatcaatcaaattgccagaaacagtttggtttttcatatggaataagtattaaagttacagtgtagttcatttattcattgatttttgtaatgtaatattctggaaaaaattttgttttcttaaaaattttgtctga

SEQ ID NO: 664 - DNA, 3348 bp, Homo sapiens
  misc_feature: Incyte ID No: 475203.8
gaagtaaatgaaacctataaattgctttttaacttcgttgaacaaaacatgaaaatagagagactggttgaagtaaagccttccttagttattgactatttaaagacagaaaagaagctattctggccaaagataaagaaggtaaatgtgcaggtaagtttcaatcctgagaacaaacaaaaaggcattttactaactggctcaaagaccgaagtactgaaggcagtggacattgtcaagcaagtctgggattcagtctgtgttaaaagtgtccatactgataagccaggagccaagcagttcttccaggataaagcacggttttatcaaagtgagatcaaacggttgtttggttgttacattgaactacaggagaatgaagtaatgaaggagggaggcagccccgctgggcagaagtgcttctctcggacagtcttggcccctggcgttgtgctgattgtgcagcagggtgacttggcacggcttcctgtcgatgtggtggtgaatgcatctaatgaggaccttaagcattatggtggcctggccgctgcgctctcaaaagcagctggccctgagctccaggccgactgtgaccagatagtgaagagagagggcagactcctaccgggcaatgccaccatctccaaggcaggaaagctgccctaccaccacgtgatccatgcagtggggccccgctggagcggatatgaggccccgaggtgtgtgtacctattaaggagagctgtgcaactcagtctctgtctagccgaaaaatacaagtaccgatccatagccatccctgctattagttctggagtctttggctttcccttaggccgatgcgtggagaccattgtttctgccatcaaggaaaacttccaattcaagaaggatggacactgcttgaaagaaatctaccttgtggatgtatctgagaagactgttgaggcctttgcagaagctgtgaaaactgtatttaaagccaccctgccagatacagctgccccgccaggtttaccaccagcagcagcggggcctgggaaaacatcatgggaaaaaggaagcctggtgtccccgggaggcctgcagatgctgttggtgaaagagggtgtgcagaatgctaagaccgatgttgttgtcaactccgttcccttggatctcgtgcttagtagagggcctctttctaagtccctcttggaaaaagctggaccagagctccaggaggaattggacacagttggacaaggggtggctgtcagcatgggcacagtgctcaaaaccagcagctggaatctggactgtcgctatgtgcttcacgtggtagctccggagtggagaaatggtagcacatcttcactcaagataatggaagacataatcagagaatgtatggagatcactgagagcttgtccttaaaatcaattgcatttccagcaataggaacaggaaacttgggatttcctaaaaacatattcgctgaattaatcatttcagaggtgttcaaatttagtagcaagaatcagctgaaaactttacaagaggttcactttctgctgcacccgagtgatcatgaaaatattcaggcattttcagatgaatttgccagaagggctaatggaaatctcgtcagtgacaaaattccgaaggctaaagatacacaaggtttttatgggactgtttctagccctgattcaggtgtgtatgaaatgaagattggctccatcatcttccaggtggcttctggagatatcacgaaagaagaggcagatgtgattgtaaattcaacatcaaactcattcaatctcaaagcaggggtctccaaagcaattttagaatgtgctggacaaaatgtagaaagggaatgttctcagcaagctcagcagcgcaaaaatgattatataatcaccggaggtggatttttgaggtgcaagaatatcattcatgtaattggtggaaatgatgtcaagagttcagtttcctctgttttgcaggagtgtgaaaaaaaaaaattactcatccatttgcctcccagccattgggacaggaaatgccaaacaacacccagataaggttgctgaagccataattgatgccattgaagactttgtccagaaaggatcagcccagtctgtgaaaaaagttaaagttgttatctttctgcctcaagtactggatgtgttttatgccaacatgaagaaaagagaagggactcagctttcttcccaacagtctgtgatgtctaaacttgcatcatttttgggcttttcaaagcaatctccccaaaaaaagaatcatttggttttggaaaagaaaacagaatcagcaacttttcgggtgtgtggtgaaaatgtcacgtgtgtggaatacgctatctcctggctacaagacctgattgaaaaagaacagtgtccttacaccagtgaagatgagtgcatcaaagactttgatgaaaaggagtatcaggagttgaatgagctgcagaagaagttaaatattaacatttccctggaccataagagacctttgattaaggttttgggaattagcagagatgtgatgcaggctagagatgaaattgaggcgatgatcaagagagttcgattggccaaagaacaggaatcccgggcagattgtatcagtgagtttatagaatggcagtataatgacaataacacttctcattgttttaacaaaatgaccaatctgaaattagaggatgcaaggagagaaaagaaaaaaacagttgatgtcaaaattaatcatcggcactacacagtgaacttgaacacatacactgccacagacacaaagggccacagtttatctgttcagcgcctcacgaaatccaaagttgacatccctgcacactggagtgatatgaagcagcagaatttctgtgtggtggagctgctgcctagtgatcctgagtacaacacggtggcaagcaagtttaatcagacctgctcacacttcagaatagagaagattgagaggatccagaatccagatctctggaatagctaccaggcaaagaaaaaaactatggatgccaagaatggccagacaatgaatgagaagcaactcttccatgggacagatgccggctccgtgccacacgtcaatcgaaatggctttaaccgcagctatgccggaaagaatgctgtggcatatggaaagggaacctattttgctgtcaatgccaattattctgccaatgatacgtactccagaccagatgcaaatgggagaaagcatgtgtattatgtgcgagtacttactggaatctatacacatggaaatcattcattaattgtgcctccttcaaagaaccctcaaaatcctactga

SEQ ID NO: 665 - DNA, 2095 bp, Homo sapiens
  misc_feature: Incyte ID No: 1327483.20
  unsure 167, 1128, 1131, 1133, 1136: a, t, c, g, or other
ttctgcagcaggaaccgcggctgctggacaagaggggtgcggtggatactgacctttgctccggcctcgtcgtgaagacacagcgcatctccccgctgtaggcttcctcccacagaacccgtttcgggcctcagagcgtctggtgagatgctgttgccgctgctgcngctgctacccatgtgctgggccgtggaggtcaagaggccccggggcgtctccctcaccaatcatcacttctacgatgagtccaagcctttcacctgcctggacggttcggccaccatcccatttgatcaggtcaacgatgactattgcgactgcaaagatggctctgacgagccaggcacggctgcctgtcctaatggcagcttccactgcaccaacactggctataagcccctgtatatcccctccaaccgggtcaacgatggtgtttgtgactgctgcgatggaacagacgagtacaacagcggcgtcatctgtgagaacacctgcaaagagaagggccgtaaggagagagagtccctgcagcagatggccgaggtcacccgcgaagggttccgtctgaagaagatccttattgaggactggaagaaggcacgggaggagaagcagaaaaagctcattgagctacaggctgggaagaagtctctggaagaccaggtggagatgctgcggacagtgaaggaggaagctgagaagccagagagagaggccaaagagcagcaccagaagctgtgggaagagcagctggctgctgccaaggcccaacaggagcaggagctggcggctgatgccttcaaggagctggatgatgacatggacgggacggtctcggtgactgagctgcagactcacccggagctggacacagatggggatggggcgttgtcagaagcggaagctcaggccctcctcagtggggacacacagacagacgccacctctttctacgaccgcgtctgggccgccatcagggacaagtaccggtccgaggcactgcccaccgaccttccaacaccttctgcccctgacttgacggagcccaaggaggagcagccgccagtgccctcgtcgcccacagaggaggaggaggaggaggaggaggaggaagaagaggctgaagangangnggnggaggaggattccgaggtgcagggggagcagcccaaggaggccccaccgccactgtcacccccgcagccggccagccctgctgaggaagacaaaatgccgccctacgacgagcagacgcaggccttcatcgatgctgcccaggaggcccgcaacaagttcgaggaggccgagcggtcgctgaaggacatggaggagtccatcaggaacctggagcaagagatttcttttgactttggccccaacggggagtttgcttacctgtacagccagtgctacgagctcaccaccaacgaatacgtctaccgcctctgccccttcaagcttgtctcgcagaaacccaaactcgggggctctcccaccagccttggcacctggggctcatggattggccccgaccacgacaagttcagtgccatgaagtatgagcaaggcacgggctgctggcagggccccaaccgctccaccaccgtgcgcctcctgtgcgggaaagagaccatggtgaccagcaccacagagcccagtcgctgcgagtacctcatggagctgatgacgccagccgcctgcccggagccaccgcctgaagcacccaccgaagacgaccatgacgagctctagctggatgggcgcagagaacctcaagaaggcatgaagccagcccctgcagtgccgtccacccgcccctctgggcctgcctgtggctctgttgccctcctctgtggcggcaggacctttgtggggcttcgtgccctgctctggggcccaggcggggctggtccacattcccaggccccaacagccttcaaagatgggtaaaggagcttgccctccctgggccccccaccttggtgactcgccccaccacccccagccctgtccctgccacccctcctagtggggactagtgaatgacttgacctgtgacctcaatacaataaatgtgatcccccacccaaaaaaa

SEQ ID NO: 666 - DNA, 3991 bp, Homo sapiens
  misc_feature: Incyte ID No: 379160.9
ccacgcgtccgaccacgcgtccgctgcatcggggcctcactggcttcaggagctgaataccctcccaggcacacacaggtgggacacaaataagggttttggaaccactattttctcatcacgacagcaacttaaaatgcctgggaagatggtcgtgatccttggagcctcaaatatactttggataatgtttgcagcttctcaagcttttaaaatcgagaccaccccagaatctagatatcttgctcagattggtgactccgtctcattgacttgcagcaccacaggctgtgagtccccatttttctcttggagaacccagatagatagtccactgaatgggaaggtgacgaatgaggggaccacatctacgctgacaatgaatcctgttagttttgggaacgaacactcttacctgtgcacagcaacttgtgaatctaggaaattggaaaaaggaatccaggtggagatctactcttttcctaaggatccagagattcatttgagtggccctctggaggctgggaagccgatcacagtcaagtgttcagttgctgatgtatacccatttgacaggctggagatagacttactgaaaggagatcatctcatgaagagtcaggaatttctggaggatgcagacaggaagtccctggaaaccaagagtttggaagtaacctttactcctgtcattgaggatattggaaaagttcttgtttgccgagctaaattacacattgatgaaatggattctgtgcccacagtaaggcaggctgtaaaagaattgcaagtctacatatcacccaagaatacagttatttctgtgaatccatccacaaagctgcaagaaggtggctctgtgaccatgacctgttccagcgagggtctaccagctccagagattttctggagtaagaaattagataatgggaatctacagcacctttctggaaatgcaactctcaccttaattgctatgaggatggaagattctggaatttatgtgtgtgaaggagttaatttgattgggaaaaacagaaaagaggtggaattaattgttcaagagaaaccatttactgttgagatctcccctggaccccggattgctgctcagattggagactcagtcatgttgacatgtagtgtcatgggctgtgaatccccatctttctcctggagaacccagatagacagccctctgagcgggaaggtgaggagtgaggggaccaattccacgctgaccctgagccctgtgagttttgagaacgaacactcttatctgtgcacagtgacttgtggacataagaaactggaaaagggaatccaggtggagctctactcattccctagagatccagaaatcgagatgagtggtggcctcgtgaatgggagctctgtcactgtaagctgcaaggttcctagcgtgtacccccttgaccggctggagattgaattacttaagggggagactattctggagaatatagagtttttggaggatacggatatgaaatctctagagaacaaaagtttggaaatgaccttcatccctaccattgaagatactggaaaagctcttgtttgtcaggctaagttacatattgatgacatggaattcgaacccaaacaaaggcagagtacgcaaacactttatgtcaatgttgcccccagagatacaaccgtcttggtcagcccttcctccatcctggaggaaggcagttctgtgaatatgacatgcttgagccagggctttcctgctccgaaaatcctgtggagcaggcagctccctaacggggagctacagcctctttctgagaatgcaactctcaccttaatttctacaaaaatggaagattctggggtttatttatgtgaaggaattaaccaggctggaagaagcagaaaggaagtggaattaattatccaagttactccaaaagacataaaacttacagcttttccttctgagagtgtcaaagaaggagacactgtcatcatctcttgtacatgtggaaatgttccagaaacatggataatcctgaagaaaaaagcggagacaggagacacagtactaaaatctatagatggcgcctataccatccgaaaggcccagttgaaggatgcgggagtatatgaatgtgaatctaaaaacaaagttggctcacaattaagaagtttaacacttgatgttcaaggaagagaaaacaacaaagattatttttctcctgagcttctcgtgctctattttgcatcctccttaataatacctgccattggaatgataatttactttgcaagaaaagccaacatgaaggggtcatatagtcttgtagaagcacagaaatcaaaagtgtagctaatgcttgatatgttcaactggagacactatttatctgtgcaaatccttgatactgctcatcattccttgagaaaaacaatgagctgagaggcagacttccctgaatgtattgaacttggaaagaaatgcccatctatgtcccttgctgtgagcaagaagtcaaagtaaaacttgctgcctgaagaacagtaactgccatcaagatgagagaactggaggagttccttgatctgtatatacaataacataatttgtacatatgtaaaataaaattatgccatagcaagattgcttaaaatagcaacactctatatttagattgttaaaataactagtgttgcttggactattataatttaatgcatgttaggaaaatttcacattaatatttgctgacagctgacctttgtcatctttcttctattttattccctttcacaaaattttattcctatatagtttattgacaataatttcaggttttgtaaagatgccgggttttatatttttatagacaaataataagcaaagggagcactgggttgactttcaggtactaaatacctcaacctatggtataatggttgactgggtttctctgtatagtactggcatggtacggagatgtttcacgaagtttgttcatcagactcctgtgcaactttcccaatgtggctgatacgttgaagcaaactcttactgcctttctcctggtttcatgacagtgttattcctttttctataaatatatttttaggaaaaaaagtcagtgatcctaattgtatcacattataagaaagcactctgtggatcaacataagtgggtacacaagaattttttttttcttggtgtatgtaagcacatttgttcctttatatctgtttacaaaactgtgaatcaaaaagacaaaactttcttcctagtttttgtaattttttttttgaactagcatgactgtagggttgagctaagtcaacaaaaattgggctctgcctcatcacagtttccctgcaagtgcagtgcatggctttctacctcctgcaggtacagtgcatcgctttctacctcctgcaggtacagtgcatggctttctacctcctgcgggtacagtgcatcgctttctacctcctgcgggtacagtgcatcgctttctacctcctgcaggtacagtgcatggctttctacctcctgcaggtacactgcatggctttctacctcctgcaggtacagtgtatcgctttctacctcctgcaggtacagtgcatcgctttctacctcctgcaggtacagtgcatcgctttctacctcctgcaggtacagtgcatcgctttctacctcctgcaggtacagtgcatcgctttctacctcctgcaggtacagtgcatcgctttctacttcctgcaagtacagtatattggtttctacttcctgcaagtacagtatattgctgtccactgtctggattgactttttaaaagggtttttattatggagattttcaaatatacactacagagaatagtatagacaaatatgtaatgttcattacccagttgactcaactacttttgtttgattacatccacgttaaaaatgttgtttattgttatattaatacacagtaaaatacc

SEQ ID NO: 667 - DNA, 2869 bp, Homo sapiens
  misc_feature: Incyte ID No: 1383506.2
  unsure 2275, 2279-2282, 2285-2287: a, t, c, g, or other
tatgattacatgctctaatgtacatcttctttacaggtgttagtaaaatggcctttcgccatttaattgagttcacatatacagcaaaattaatgatacaaggagaagaagaagccaatgatgtatggaaagcagcagagtttctacaaatgctagaagctatcaaagcccttgaagtcaggaacaaagaaaactcagctcccttagaggaaaataccacaggaaaaaatgaggccaaaaaaaggaagattgcagaaacttcaaatgttatcactgagtcattgccatctgcagaatcagaacctgttgaaattgaggtagagattgccgaaggcaccattgaagtggaagatgaaggcatcgaaacattagaggaagtggcttctgccaagcagtccgtaaagtacatacagagcacaggttcctctgatgattctgctctagcactgttggcagatattaccagcaagtaccgtcaaggtgacagaaaagggcagattaaagaagatggctgtccatctgaccccacgagcaaacaggtagaaggtattgaaattgtggaacttcagctgtcacatgtgaaggacttgttccattgtgagaaatgtaaccgttcatttaaattgttttaccattttaaggagcacatgaaatcacactccactgagagtttcaagtgtgaaatatgcaataaacgatatcttcgagagagcgcatggaaacagcacctaaattgttaccaccttgaagaaggtggagtcagtaagaagcaaagaactgggaaaaaaattcatgtatgtcagtactgtgagaaacagtttgaccattttggacattttaaagaacatcttcgaaaacatacaggtgaaaaaccttttgaatgtccaaattgtcatgaacgatttgctagaaatagcactctgaaatgtcacctcactgcatgccaaactggagtaggggcaaaaaaaggaaggaagaagctctacgaatgccaggtctgcaacagtgtgtttaacagctgggaccagttcaaagatcacttggtaatacacactggagataaacccaaccattgtactttatgtgatttgtggtttatgcaaggaaatgaattaaggaggcatctcagtgatgctcacaatatttcagagcgtctagtaacggaagaagttctttcagtagaaacacgtgtgcaaactgaacctgtaacatcaatgactattatagaacaagttgggaaggtgcatgtgctaccattgcttcaggttcaggtggattcagcacaagtgactgtggaacaagtccatccagatctgctccaggacagccaggtgcacgattcacacatgagtgagcttccagagcaggtccaagtgagttatctagaagtgggccgaattcagactgaagaaggtactgaagtacatgtagaggagctgcatgttgaacgggtcaatcaaatgccagtggaagtacaaactgaacttctagaagcagatttggaccacgtgaccccagaaatcatgaaccaagaggagagagagtctagccaagcagatgctgctgaggctgccagggaagatcacgaagatgctgaggatttagagaccaagccaacagtggattctgaagcagaaaaggcagagaatgaggacagaacagctctgccagttttagaatgaaattacacatgaatatatttttaaatttacttgttgggtttttgaactgattatgggcagtttgactgtccttaattaagcctaacagacaagtggaccaaagttaagctgtttcctgttgtgctgaactgttgtccgttgaaacacattgattcccctccccctacttattgccacagaggagggatcttttccataactgaaggggagttttgagaagtatatttctggaaacttaaatggattatattcttattatatagttgggtacgaatgtatctattttcattgtggtaaaagttcttccttttctctttcccaggtcatgttcttcctcaaattttttccatattgtaaaatcaaacttaaatcattagaatacaagtttatgtattctaatgcatgttagaaaattgaataatataggaaacacaaggctgcatgatgaaaagtgcattgttactgtgcagttaaattttggcttctggctttctttagtttgaacaaacgttcttgtctaccccagtagtcacagatgccatctttgcaacagaaagagtggtggtggcaaaatttctagaatgttaaaaaanaaannnnaannnaaaatccacacccatgtgccttctcaaaaccaactgaacttctataaagcatctctggttctttcaaagtttgtgttgtaaggagcaatgtagatgatgctataatactttatatttttgcttataatgacaaccaccagttctttttcacttaagttaggttgagaaattttatttaatggccactgaagggccattttcaattgggaaaatttatttacatctgtggtaaactttattttgatgaaaagttgcactagtattttaccaccagatgagaaaaagatgagcagcatttaaaaattaatgtatttaaaataaagtacagagaaagacatgtatataattatcaggctttgttttgaatggaatcttttcccccaattcttaatgtaaagatcttgtgctataacttttaaagccatacaaataagagtgctaaactgtggacttaaaagtaggtgtgtaaatatttttaatcagtattacttggaaaataaaatataacaaacccatagaccaatatgctattttttttacctgttaaatattgggagtctttacattttttaagtaaacttt

SEQ ID NO: 668 - DNA, 4366 bp, Homo sapiens
  misc_feature: Incyte ID No: 319136.21
  unsure 3345-3660: a, t, c, g, or other
tgtgcgggtcgacccatgagttcggaccagcgagctcccgggaggtgtgtggacatcagccctgacggggaaggcgagccaggagcctgcaggcctgaaccagggtgatgctgaagatgatgaccttcttccaaggcctctagagccatcagcctgtgccaggcaccctcgacttgcctagaggcccccaaaagttgcagtccacatcagaggcagagtcagaggcctccatgtcggaggcctcctctgaggacctggtgccacccctggaggctggggcagccccatatagggaggaggaagaggcggcgaagaagaagaaggagaagaagaagaagtccaaaggcctggccaatgtgttctgcgtcttcaccaaagggaagaagaagaagggtcagcccagctcagcggagcccgaggacgcagccgggtccaggcaggggctggatggcccgccccccacagtggaggagctgaaggcggcgctggagcgcgggcagctggaggcggcgcggccgctgctggcgctggagcgggagctggcggcggcggcggcggcgggcggtgtgagcgaggaggagctggtgcggcgccagagcaaggtggaggcgctgtacgagctgctgcgcgaccaggtgctgggcgtgctgcggcggccgctggaggcgccgcccgagcggctgcgccaggcgctggccgtggtggcggagcaggagcgcgaggaccgccaggcggtggcggcggggccggggacctcggggctggcggccacgcgcccgcggcgctggctgcagctgtggcggcgcggcgtggcggaggcggccgaggagcgcatgggccagcggccggccgcgggcgccgaggtccccgagagcgtctttctgcacttgggccgcaccatgaaggaggacctggaggccgtggtggagcggctgaagccgctgttccccgccgagttcggcgtcgtggcggcctacgccgagagctaccaccagcacttcgcggcccacctggccgccgtggcgcagttcgagctgtgcgagcgcgacacctacatgctgctgctctgggtggagaacctctaccccaatgacatcatcaacagccccaagctggtgggtgagctgcagggtatggggctcgggagcctcctgccccccaggcagatccgactgctggaggccacattcctgtccagtgaggcggccaatgtgagggagttgatggaccgagctctggagctagaggcacggcgctgggctgaggatgtgcctccccagaggctggacggccactgccacagcgagctggccatcgacatcatccagatcacctcccaggcccaggccaaggccgagagcatcacgctggacttgggctcacagataaagcgggtgctgctggtggagctgcctgcgttcctgaggagctaccagcgcgcctttaatgaatttctggagagaggcaagcagctgacgaattacagggccaatgttattgccaacatcaacaactgcctgtccttccggatgtccatggagcagaattggcaggtaccccaggacaccctgagcctcctgctgggccccctgggtgagctcaagagccacggctttgacaccctgctccagaacctgcatgaggacctgaagccactgttcaagaggttcacgcacacccgctgggcggcccctgtggagaccctggaaaacatcatcgccactgtagacacgaggctgcctgagttctcagagctgcagggctgtttccgggaggagctcatggaggccttgcacctgcacctggtgaaggagtacatcatccaactcagcaaggggcgcctggtcctcaagacggccgagcagcagcagcagctggctgggtacatcctggccaatgctgacaccatccagcacttctgcacccagcacggctccccggcgacctggctgcagcctgctctccctacgctggccgagatcattcgcctgcaggaccccagtgccatcaagattgaggtggccacttatgccacctgctaccctgacttcagcaaaggccacctgagcgctatcctggccatcaaggggaacctatccaacagtgaggtcaagcgcatccggagcatcttggacgtcagcatgggggcgcaggagccctcccggcccctattttcccttataaaggttggttagcttttcctgtggcctgacctgcctgtgagtgcccagcaagccttgggcacaccccgctgggagctgttaagagcagcgctggttctcggttcctcccgggtctcctgtgctctgatgctacttctgcctagccctggcggaggtgcaggccctgtcagctggaactggacagaccttggtttgtttacatgtccgatgggggcaggagctcccatcctgggcagccaaccaggcaacaccaaggactctttgtaaacgatagctgatcgtgtgcacgcaaggaaagaaccaggagggagagtgcagccaggctcagggatccccggacacctctgtccagagcccctccacagtcggcctcatgactgtcctcctcgtgggtggggccgagggccctcttcagctctctggagacaggggccgagcctcacccatctgccctctgcagcccagggccgccgtgagcgggattcagcaatggtggaatggaagacagaactggaagagaaagaaggaaaagatgagctctcgtctggcaggggcttttagggtcctgtggcgagctgtgagcaccgccagcattagacgtcacatccaggtggccccacggcccctacaggctggccctgcaatggggccctgagccctccctcttcatcccccaaggcctcaactagagggtggtcccccgagggcttggtgtctactaccgaagggcccaagacctcctgggtcctctcaggctcccccttccccaaggcagggacaggccctgggggtgccaccgtgggccctgccacccagaagtctggctgaggtctgggcaggggcagggcaagcttgacctctcactgttgaccctttggcctctgtatttgtttcctattgccgtgacaggtttccacaaacttcgtggatcaaaacgaggtcttccagttctgcgggtcagaaggctgacccggggctcaaatctgggtgtcggcagtcctgcactccttctggaggctctaggggagaattcatttctggccttttcatttttagaggctgaccgtaattcttgacttcaggctcctccatcttcagagccagctgtgggtagttgaatctttttcccgtcacctcattgaggcctcccctctcctgcctnnnnnnnnnnnnnnnnnnnnnnnnnnnnnnnnnnnnnnnnnnnnnnnnnnnnnnnnnnnnnnnnnnnnnnnnnnnnnnnnnnnnnnnnnnnnnnnnnnnnnnnnnnnnnnnnnnnnnnnnnnnnnnnnnnnnnnnnnnnnnnnnnnnnnnnnnnnnnnnnnnnnnnnnnnnnnnnnnnnnnnnnnnnnnnnnnnnnnnnnnnnnnnnnnnnnnnnnnnnnnnnnnnnnnnnnnnnnnnnnnnnnnnnnnnnnnnnnnnnnnnnnnnnnnnnnnnnnnnnnnnnnnnnnnnnnnnnnnnnnnnnnnnnnnnnnnnnncgcttatgatcacattgcgcctacccagagaacccaggtcgtctttcatttcaaggtcagctgattagcaaccctaatttcatctgcaaccttatttctcctttacggtgtaacctaacatagatcacaggctctgagggacgtgtcacgatgtcacatcatttggagaggaccgtgtattcgtgcccaccgcacccttccggttcatcccctgccctgccgggcacctcgctctaccccaggaaaatgtgagctcgttttcctgctcggcatgtgctccccctaaggctctgctcctccctgggcctgaaagttccttctcagcctgagagggggcccttcggactcaggcatgactcagcccggctgatgcctctgcagtgctgagtcaggatttggggccggctctcttgggtctgtccccttttcccaggtactgccttacaaagctgtggccaggaagtggccggtataaaggatgcccaaggtctttgtacgtgtgtaggagttagcgtgtttgatattgttaatataataataattattttttagagtactgcttttgtatgtatgttgaacaggatccaggtttttatagcttgaggctgtcaaatttcaatctagaagttttaacagctaagatgcaatcccatgaaaataaaagtgtgcacaagggcagctcatcagaatcggcgtacatagcatt

SEQ ID NO: 669 - DNA, 374 bp, Homo sapiens
  misc_feature: Incyte ID No: 319136.16
  unsure 334, 350: a, t, c, g, or other
ccatgggcagagcggggtgccagcatgctttgtccctgtgtaggatccgccagagccgtgacctggcctcgtctgtctctccctttccaacccctatcccaggcgaaggagaactcacctgactggcagatgggtgaagggactctgctccttcccaaattccaggccagattggctgcggagaggcccacccttccgtggcagctgagcccgtctctgaacacaaaccagacctcctgtgtccacagctgtagctttcaggtcaatgccagcatgttctgtcttccattccaccattgctgaatcccgctcacggcggccctgggctgcaganggcagatgggtgaggntcgggccctgtctccagagagctg

SEQ ID NO: 670 - DNA, 2070 bp, Homo sapiens
  misc_feature: Incyte ID No: 234313.39
gctagatcctgactctggacaagcaccacccagaagctgtccacatcaattatattcatcttccattggccagaaatttggctttgcggttgggaagtgttggtatttagctaagtgttggcatcattagtcttagccagatgctacttgcccagcagataattcaactatcaaagaagaaggagagaatggccagactgttctgtgtggtatgggggagttacatatagagattattcatgatcgaatcaagagggaatatggactggagacctatctcgggcctctccaggtggcatatcgagagaccatcctaaactcagttcgtgccacagataccttagatagaactttaggagacaaaaggcatcttgtgactgtagaagtggaagcaaggccaattgaaacatcatctgttatgcctgtgattgagtttgagtatgctgaaagtatcaatgaaggccttttgaaggtctcccaagaggccattgaaaatggaattcacagcgcatgtctccaaggaccattgcttggatccccaattcaggatgtagcaattactttacattccctgacaattcatcctggcacctccacaactatgatttctgcctgtgtctcaagatgcgtgcaaaaggctctgaagaaagctgataagcaagttttggagcctctgatgaatcttgaggttacagtagctagagattatctcagccctgtcctggcagatctggcacaaagaagaggaaacattcaggaaattcagactcgccaggacaacaaagttgttattggatttgttcccttagcagaaattatgggttattcaactgtgcttcgaacgctaacatcaggctcagctacttttgccttagaactatctacttatcaagccatgaatcctcaagatcaaaatacactgctcaaccggagaagtggtttgacctaaatgttttagtttttggagagaaattcaggagcacctagctacttcattttcagtaagaacaatttttattgctttatttattggacgaataaagtactgtttcagtacattcagagaactagataaaagatataacttaagctttgatagtggcactggagccacccgttttaatttatataatgagaaatgtgctttgatgtttaaagccactgtacctgaatcatgctgttcatctatgaagttattactataagtagccttcagaagagtggtatcacaaagttgtgtttcttttgtgtccttaagcttgtctcacaagaaagatgccaggcctctaaatgtaataagatagagggtcaaaggttcaatcaataaaaatattttattcaaaaaacagtctaatatcttattttacatgatttcaaaataaagttgattgtagtacagattgctgtggcctttttcccctccattttttacatgttctcatggttacaatatccagcataaagaggttgtgcagctattccacgtctgtagataacatgaataaagatattttagattgatttagattgatatcattcataaagatattttagattgatattcatgtcatcttagaaacttaaattagaatcactaaatcacagcattactgaaaataagggaagaaaattaaagcaactcaagatggagttctaagttacaccaacattttttgtatctataaaacagtcacaagtctgaatatatctttacaggtattattacttacaaaaaaataattcctggtttcttctaattactatttgttaggtaacatacatttctatttatagcaaaagaaactaacactgaataagaaggttaaaaatcacactggacttaatagatttcttactcgaccatcctgcagcggtgccttgtcagtctgtcataggcgtcatccatatctctgacatctttggaactccagagtctctcaccaacagcacttgcccgaggccataatcttggagtgaggttagttgcatccacatattctccccatagacaagcttctccaccaatgaaaagttgtttctgtttctgagtaccgccaaaatcaagaggtt

SEQ ID NO: 671 - DNA, 1158 bp, Homo sapiens
  misc_feature: Incyte ID No: 008076CB1
  unsure 907: a, t, c, g, or other
cgtagaagattccagcaccctcccctaactccaggccagactcctttcagctaaaggggagatctggatggcatctacttcgtatgactattgcagagtgcccatggaagacggggataagcgctgtaagcttctgctggggataggaattctggtgctcctgatcatcgtgattctgggggtgcccttgattatcttcaccatcaaggccaacagcgaggcctgccgggacggccttcgggcagtgatggagtgtcgcaatgtcacccatctcctgcaacaagagctgaccgaggcccagaagggctttcaggatgtggaggcccaggccgccacctgcaaccacactgtgatggccctaatggcttccctggatgcagagaaggcccaaggacaaaagaaagtggaggagcttgagggagagatcactacattaaaccataagcttcaggacgcgtctgcagaggtggagcgactgagaagagaaaaccaggtcttaagcgtgagaatcgcggacaagaagtactaccccagctcccaggactccagctccgctgcggcgccccagctgctgattgtgctgctgggcctcagcgctctgctgcagtgagatcccaggaagctggcacatcttggaaggtccgtcctgctcggcttttcgcttgaacattcccttgatctcatcagttctgagcgggtcatggggcaacacggttagcggggagagcacggggtagccggagaagggcctctggagcaggtctggaggggccatggggcagtcctgggtgtggggacacatcgggttgacccagggctgtctccctccagagcctccctccggacaagatcccctctgtcccaccgaaatggcagggtgcggtggggcagtccgctgtgtatggtnttttgcggggggtgctttcgggtctgactcacaaaaacccccttgagaaacacctaaaaaaaaaaaaaaaacaaaaggggccaaaagccgaggggcccccccgagaaaacaccccccccagtgttaaacccggggaccgaaaccccgcggggagggcccccaaaaagcccgggacaaatggtcttgctccccccccgccgaaggccggatagaaaaccagagacaatcctgttaacacccgccgccccccc

SEQ ID NO: 672 - DNA, 765 bp, Homo sapiens
  misc_feature: Incyte ID No: 480500.14
  unsure 91: a, t, c, g, or other
gcgtgagtcaccacgcctggccagagatcatatgtcttggatagaaaagggaacacatcttagaatgctgagagaaagtataagaatgatngattttacttcatttgctaaactttccggatttcttagagctccaattcttctcaaactgagagaactgcttctgtctctggagagacagaagtgcagcttcagtaattctcagtgtgtgagctgcctaggatcagagagccttcatggaagtggccactacgtggggatcccttcagagatatctgagacctctctggggatcaggaaccacacaatccccagggttcctgagaccccaggcctaaacctgagacttcctctgcagttgatgtggtcctggatccagacaccgctcatcccgatctcttcctgtcagaggaccggagaagtgtgagaaggtgccccttcaggcacctaggggagagcgtgcctgacaacccagagagattcgacagtcagccttgtgtcctaggccgggagagcttcgcttcagggaaacattactgggaggtggaggtggaaaacgtgattgagtggactgtgggggtctgtagagacagtgttgagaggaaaggggaggtcctgctgattcctcagaatggcttctggaccttggagatgcataaagggcaataccgggccgtgtcctcccctgataggattctccctttgaaggagtccctttgccgggtgggcgtcttcctggactatgaagctggagatgtctccttc

SEQ ID NO: 673 - DNA, 892 bp, Homo sapiens
  misc_feature: Incyte ID No: 249096.18
  unsure 293, 295, 300: a, t, c, g, or other
tttaggtcttcaatcactcagtaaacatccctgagcttctagaggcttaggtactgtcattcttgaagggctcaagatttccgaacctatatcctttcttttagctcccaagcagacaccacgtgctcctcctaagccaaaaacatgcaccacgcccaagaatcccacaaacacaaccagttcctaaggtgccccagcgtgttactgcaaaaccaaaaacgtcaccaagtccagaagtgtcatacaccacacctgctccaaaagatgtgctccttcctcataaaccatacccncnaggtntctcagagcgaacctgctcctctagagacacgaggcatcccttttatacccatgatttccccaagtcctagtcaagaggaactacagaccactctggaagaaacagaccaatccacccaagaacctttcacaactaagattccacgaacaactgaactagcaaagacaactcaggcgccacacagattttatactactgtgaggcccagaacatctgacaagccacacatcagacctgttctgaataggacaactacaagacctactaggcccaaacccagtgggatgcccagtgggaatggagtgggaacaggggtcaagcaagcacccaaaccatcaggtgctgatagaaatgtatcagtggactctacccaccccactaaaaagccagggactcgccgcccacccttgccacccagacctacacacccacgaagaaaacctttaccaccaaataatgtcactggaaagccaggaagtgtcatacaccacacctgctgcagaacaggttcgctctgagagacctcagggtatggtttatgaggaaggagcacatctttaggagcaggtgtggtgtatgacacttctggac

SEQ ID NO: 674 - DNA, 1454 bp, Homo sapiens
  misc_feature: Incyte ID No: 981199.1
gactgaaggtgattgaaggttcaccatcatcctcaccaacttttgggccataattcacccaaccctttggtggagcctgaaaaaaatctgggcagaatgtaggacttctttattttgtttaaaggggtaacacagagtgcccttatgaaggagttggagatcctgcaaggaagagaaggagtgaaggagagatcaagagagagaaacaatgaggaacatttcatttgacccaacatcctttaggagcataaatgttgacactaagttatcccttttgtgctaaaatggacagtattggcaaaatgataccacaacttcttattctctggctctatattgctttggaaacacttaaacatcaaatggagttaaatacatatttgaaatttaggttaggaaatattggtgaggaggcctcaaaaagggggaaacatcttttgtctgggaggatattttccattttgtggatttccctgatctttttctaccaccctgatgggtgtaggtgaattatcattttgctacattttagaggtcatccaggatttttgaaactttacattctttacggttaagcaagatgtacagctcagtcaaagacactaaattcttcttagaaaaatagtgctaaggagtatagcagatgaccatatatgtgtgttggctgggagaatatccatcttaaaagtgagagtgatgttgtggagacagttggaaatgtcaatgctagagtctctgtggtgtgaatgggcacgttagggttgtcgcattagaaagtgactgtttctgacagaaatttgtagctttgtgcaaactcacccaccatctacctcaataaaatatagagaaaagaaaaatagagcagtttgagttctatgaggtatgcaggcccagagagacataagtatgttcctttagtcttgcttcctgtgtgccacactgcccctccacaaaccatagctgggggcaattgtttaaagtcatttttgttcccgacttagctgccttgcacattatcttcattttccctggaatttgatacagagagcaatttatagccaattgatagcttatgctgtttacaatgtaaattcgtggtaaataacttaggaactgcctcttctttttctttgaaaacctacttataactgttgctaataagaatgtgtatctgtcccggacaacttgtccccatacagttgggttctaacccttaatgctttggcccaaataaactctctacttatatcagtttttcctacacttcttccttttaggtcaacaatacccaagaggggttactgtgctgggtaatgtgtaaacttgtgtcttgtttagaaagataaatttaaagactatcacattgctttttcataaaacaagacaggtctacaattaatttattttgatgcaaattgataggggggccaagtaagccccatatgctttaatga

SEQ ID NO: 675 - DNA, 2150 bp, Homo sapiens
  misc_feature: Incyte ID No: 227931.4
  unsure 2147: a, t, c, g, or other
ggcggatcaggccccggcccactgtgcacgccccccaggcacggcgggcgtgatgatctctctgagccgcatcctcacgaagctgctgctgcccgacgagcgcgccagcacgctcatcttcttcctggtgtcggtggcgctggagctgctgtgtttcctgctgcacctgttagtgcggcgcagccgcttcgtgctcttctataccacacggccgcgtgacagccaccggggcaggccaggcctgggcaggggctatggctaccgcgtgcaccacgacgttgtcgccggggacgtccacttcgagcacccagccccggccctggcccccaacgagtccccaaaggacagcccagcccacgaggtgaccggcagcggcggggcctacatgcgctttgacgtgccgcggccaagggtccagcgcagctggcccaccttcagagccctgttactgcaccgctacgtggtggcgcgggtgatctgggccgacatgctctccatcgccgtgacctacttcatcacgctgtgcctgttccccggcctcgagtctgagatccgccactgcatcctgggcgagtggctgcccatcctcatcatggctgtgttcaacctgtcagacttcgtgggcaagatcctggcagccctgcccgtggactggcggggcacccacctgctggcctgctcctgcctgcgtgtggtcttcatccccctcttcatcctgtgcgtctaccccagcggcatgcccgccctccgtcaccccgcctggccctgcatcttctcactgctcatgggcatcagcaacggctacttcggcagcgtgcccatgatcctggcggcaggcaaagtgagccccaagcagcgggagctggcagggaacaccatgaccgtgtcctacatgtcagggctgacgctggggtccgccgtggcctactgcacctacagcctcacccgcgacgctcacggcagctgcctgcacgcctccaccgccaatggttccatcctcgcaggcctctgagccagccccgcccactgccagggacgccgagggcctgaccaggggccccgaggcctgagggcccctcccctgtccccacctcagtgcctgcggggccctgagcctccccctgtgccagcagccccactccctcagggtccagccatgccccaccctggactgaagttctgcaaagtcctccgaggaccggaacacgtttctgcgacccggggctctggccagcactgtgttctgcgtttggtctcatacctgcgtctaccttccatctgtgtccagcggccccggctccagcccagccagcactctgcagggacacacgcaccgtgtccccacccaggacagcagacacccgccagagtgtgcgcgcccagtgactgcaccccggccctcatcacccaccggcactgattggggcaccgcctggcccagcctccaccagggacccctcctcatgaactctggagccctgagaggagaggggcagccccccaccttgtcaccctcagggcttccccttctgtcctcattcttagagactgcttctcccaaacataacgcgttagccatgaaggagtcggagccctgggtccgaatggacccgcctgcggtctgcatcagcctctgggaaaccacagcagtgatgccagctgggcacgtcaggacctccccacacacccacacgatgccacaggtcagggggctgtgcctgactagggagccctcccattgccttcctggcccgggatagaagaggggaggtaagtctgggggctacgaagccgggcccccacaccctggctgaagtcagcttgacctaggtcttgaccctcatccagcaagggactcgacagacccaagggtccctggaacgtagggaggggctgggggtcactccagcccgggcctcccagaacaccaggcccgtgtgggtggcaccctgaggtcaggggatcctaagggtgtccttccagagacggtgtttccagggggaggaccgcccccgcttccagatccccggccccggctgtgactgccctgtttcacccctgctgtgtcccatcccccgtctgtccactaactgtaccgcaccggccattaaaagatgaaggcagaccgctgcagaaaaaaaaaaaanggg

SEQ ID NO: 676 - DNA, 4364 bp, Homo sapiens
  misc_feature: Incyte ID No: 244366.8
ccgcgcgccggctccgagacgagcgacgcctggcgggagcgcgcggcagcggggcgggcgtggagcgtgcgggggccgcgcgctgcttctctgaggcaggacggcactgccgggaggcggcggtgacaacgacggcggtggtgacgggcaccgggctcgcgggtgagacacagtaacctggttgaactctgcatctggaaagctgaagactgaagaaagataagagacattgactagtctggaaacagggacatctttggaacttcgttttcatccacagtaaacttttgaagtgtcatcaattggaattgatttcttcatcttattctgcctattgggaagaacatggcttcaaggattttaagtttccctttagttttacatgaactttgtaggaaacagagcccttaaagggcttgggaataacaagaagagattgaagacagagaagcttgccctgttttccttgccccttcaaagaaaaggatttacagctcaaacttagaacagctgttgtccagctttagccatcaagagagaaataaattaaaccaccattgccagactacaagccctggtgaagtcagggtgtgggagtggtggcattgagaagactacctaaaagagacaaagactgcagtaaacaaagctcctctttaaagttggaaggggcctcaggttccttcttggattgaaatagaaatagaaacacagggcacacctcttttaggtgcagctcacattttatggaactgtagtcgtggaggtactatagtatctcagaagaatttttctttgcccaaagtttttttgccataccctgatattctctccttcttttgaagacctgcctccatccatgagctgtatcttgatctgtctgactgtccatgttttccacctgcaaccatttgcatgtgtacagcctactgtttgtctccagtttttaaactgtacaagttgtgtttcttaatcttcccttctgccttgttctggggaggtggttattcatcatttggaatcacctttccccctcccatgtgctttccttcatttgagatcttttgacctttggctttatttgggagggggaagggtgataaagttttctgtttccctggttttcttttgtactcctctctgttgcttccctcctcccattttcttgtctgttctgccgctgtgtgggcctgggctatgcggcagggcagatttcccatcagagctccaacatgcccgcagagtctggaaagagattcaaacccagcaagtatgtcccggtctctgcagccgccatcttcctagtgggagctacgacactcttctttgcctttacgtgtccaggactaagcctgtatgtgtcacctgcagtgcccatctacaatgcaattatgtttctctttgtgttggccaacttcagcatggccaccttcatggacccagggattttccctcgagctgaggaggatgaggacaaggaagatgatttccgagctcccctttacaaaacagtggagataaagggcatccaggtgcgcatgaaatggtgtgccacctgccgcttttaccgtccccctcgatgttcccactgcagtgtctgtgacaactgtgtggaggaatttgatcatcactgcccctgggtgaataactgtattggtcgccggaactaccgttattttttccttttcctcctttccctgacagcccacattatgggtgtgtttggctttggcctcctttatgtcctctaccacatagaggaactctcaggggtccgcacggctgtcacaatggcagtaatgtgtgtggctggcttattcttcatccctgtagctggcctcacgggatttcacgtggttctggtggccaggggacgcacaaccaatgaacaggttacgggtaaattccggggaggtgtgaaccccttcaccaatggctgctgtaacaatgtcagccgtgttctctgcagttctccagcacccaggtatttggggagaccaaagaaagagaagacaattgtaatcagacctcccttccttcgaccagaagtttcagatgggcagataactgtgaagatcatggataatggcatccagggagagctgaggagaacaaagtctaagggaagcctggagataacagagagccagtctgcagatgctgaacctccacctcctcctaagccagacctgagccgttacacagggttgcgaacacacctcggcctggctactaatgaggatagtagcttattggccaaggacagccccccgacacctaccatgtacaagtatcggccgggttacagtagcagcagtacgtcagctgccatgccgcattcctccagcgccaagttgagtcgtggggacagcttgaaggagccaacctcaattgcagagagcagccgtcaccccagctaccgctcagagcccagcttggaaccagagagcttccgttctcctacctttggcaaaagttttcacttcgatccactatccagtggctcacgctcctccagcctcaagtcagcccagggcacaggctttgagctgggccagttgcaatccattcgttcagagggcaccacctccacctcctataagagcctggccaaccagacacgcaatggaagcctatcttatgacagcttgctcacaccttcagacagccctgattttgagtcagtgcaggcatggcccgagcctggtgttgactgaatgcctgagtcccccaagcctggttcttcctcacggcccgggagtgggggtgactggcgcagcaacttctctcgttcctggagagaggccacaatgtggcgcgacagattgtcgtaacggactggtgagggctctcggtgtgttgggccagttggcaccaaacgtgggtgcctctcagcttcccgttgctgggccagcctggctgacaggaagggagaggtatagctaaaggtgggtctggctcagccctgcctgcactgactcaaaatcagggctgtctgaaggtgtgagcaagctgtcataagataggcttccattgcgtgtctggttggccagggggaggctgagcctaagctcttgggctgccccgttggatttgctgtaggtggtcttcagctgtacttcatctttgggtgtcagtaatggctgcaaggccacttcttctgtctcagagacaccaggttgggctttttggctgctgtaagacatcgatcggcccaggtaggcgcagaggcgttggggaggggaggtcccttgagggaaggaaggtggccagttggcaccaaacgtgggtgcctctcagcttcccgttgctgggccagcctggctgacaggaagggagaggtatagcctaaaggtgggtctggctcaggccctgcctgcactgactcaaaatcagggctgtctgaaggtgtgagcaagctgtcataagataggcttccattgcgtgtctggttggccaggctcttataggaggtggaggtggtgatactgggggcggggaaggcctagaaatactttgagccatggccttgccagtgtcccgtgccctccagtgtcaaagatttggggcactgcccgtcgaaatggaaaggttggtgctcagcctctggagcctcacctgcagggcgtccccagctaacacccatccacgcaccacctccaggacgagaacccttgatgtcaaaaccaagtgcccagtggaggcggtgaagctctcggaaatgctgccacctgtgtgaggccgggtctgaactcgagggagtcggagctcagctgtcggtttaaagagacactgaggggaccgggctgccgccctcagcctgcattcctgtgcgcaatcgattccgcaatgacagcaccttactccttcctgcggcaggctcacccctgcctgtgggatgttgtgagaggaacatgagccagacaaagacttggctcagggctccgtggaacaagccaggatgcacggggagctgggggagcccccagcctggggcagcccagcaggccgctgaacaaacaccccagaagccagcactgtggcagggtgctggggagatgcccctctgagccttcctcccccctcagacctgaatgcactccacagttgggggctgcccctgccactcccctggtaatgcataaaaggggaggggaaggttccctggggcttgagctccctctgtggaggtgaggaggggagattccgttcacatccaggaggggcaaaatgactgatgtatttttatgtatctacacagagagtgcattttctctccagagatgctgtctggttaacaaaggaataaggtgctgtcattgcggaatcgattgcgcacaggaatgcaggctgagggcggcagc

SEQ ID NO: 677 - DNA, 811 bp, Homo sapiens
  misc_feature: Incyte ID No: 990353.16
  unsure 806: a, t, c, g, or other
gtcgggagtcatgctgacgtggcccgacggtctcatgtaccagaaattccggaaccaattcctctccttttccatgtaccagagcttcgtgcagtttctccagtactactaccagagcggctgcctctaccgcctgcgggcgctgggcgagcggcacaccatggacctcactgtgggtgagtcgggagtggccctggcatctggacattcccctttcctcccatcccgggtctgagtggtagcgtcccctctgtccctggccgtcctgtgccctgaccttcctccccgcagagggcttccagtcctggatgtggcggggcctcaccttcctgctgccttttcttttctttggacacgtaagtcgtgcctctgtgtccctgcctgtctgtccgtcctctgcgccggtttcgggctccagcagggactggtacttctgagtaaaatgcctcctccctgcttagttctggcagctttttaacgcgctgacgttgttcaacctggcccaggaccctcagtgcaaggagtggcaggtgcttatgtgcggctttcccttcctcctccttttcctcggcaatttcttcaccaccctgagggttgtgcaccacaagtttcacagtcagcggcacgggagcaagaaggattgaggctgggccttcccctgccggcccagaggggcttctgtcctgtgtgttgtgggaggggatgggaggcgcccctcgagtgtgcgtgtatcagggggtctcttctattctcccttgggttttatgggcgctgtgggccctgaaggaagacctggcccatacctnaataa

SEQ ID NO: 678 - DNA, 1045 bp, Homo sapiens
  misc_feature: Incyte ID No: 1095625.8
gctttttgcctcaccttttcaggatcccaactcaccagaggcagtttgtgttgagaacatgacaaagcctcatgacaaaatgaatgggggtggggccaaggaactgcatgaagaaaccagaaggttgtgtggaagtgcggccgggtgtgtggcaacattacttcatgatgcagccatgaaccctgcggaagtggtcaagcagaggatgcagatgtacaactcaccataccaccgggtgacagactgtgtacgggcagtgtggcaaaatgaaggggccggggccttttaccgcagctacaccacccagctgaccatgaacgttcctttccaagccattcacttcatgacctatgaattcctggcaggagcactttaacccccagagacggtacaacccaagctcccacgtcctctctggagcttgcgcaggagctgtagctgccgcagccacaaccccactggacgtttgcaaaacactgctcaacacccaggagtccttggctttgaactcacacattacaggacatatcacaggcatggctagtgccttcaggacggtatatcaagtaggtggggtgaccgcctatttccgaggggtgcaggccagagtaatttaccagatcccctccacagccatcgcatggtctgtgtatgagttcttcaaatacctaatcactaaaaggcaagaagagtggagggctggcaagtgaagtagcactgaacgaagccaggggttcagatgacactgctgcatcctggtcacattctctgtctcctggaatgctcccacctcaagtggagttagaaggaaggtagaggggctctcccccaggattttggtgttttgactaacaccagttcctgccaacctctgttgccaccacctttccttccaggccctaagcacgtgcagcaaagcacaccacagcacctttgataacctctctccatcctgggcctgatgacctgctctagactgttatagagggataagcagctcattcccctggttcctaataaaaagcctttaaatttacaaaaaaaa

SEQ ID NO: 679 - DNA, 1560 bp, Homo sapiens
  misc_feature: Incyte ID No: 977751.16
caattgctgccgccagcctggcacaggtgcacagagccaagctgcacgatggcaccagcgtggctgtgaaggtatatgggggctgccttgttcagcagtgggctggggcggggcacagtggggccccaagttctcaccacaccctcgcccagtgcaggtgcagtacatcgacctgcgggaccgctttgatggggacatccacaccctggagctcctgctgcggctcgttgaggtcatgcaccccagctttggcttcagctgggtcctccaggtacagccccaccccttccccggccagcaggagcaaacacgtaggcagagctggtaggagcagctggtaggcagagctggtcttcaaccgccatctggcccccaggacctgaaggggaccctggcccaggagctggacttcgagaatgagggccgcaacgcagagcgctgtgcgcgggagctggcgcacttcccctacgtcgtggtgccccgcgtgcactgggacaagtccagcaagcgcgtgctcactgccgacttctgcgccggctgcaaggtcaacgatgtggaggccatcaggagccagggctggcagtgcatgacatagcagaaaagctcatcaaggcctttgctgagcagattttacaccggcttcatccactcggacccacatcctggcaacgttctggtgcggaaaggcccggacgggaaagcggagctggtgctgctggaccacgggctctaccagttcctggaggagaaggaccgcgcagccctctgccagctgtggcgggccatcatcctgcgggacgacgccgccatgagggcgcacgcagccgcactgggggtgcaagactacctcctgttcgccgagatgctcatgcagcgccccgtgcgcctggggcagctgtggggctcgcacctactgagccgcgaagaggcggcctacatggtggacatggcccgcgagcgcttcgaggccgtcatggcggtgctcagggagctgccgcggcccatgctgctggtgctgcgcaacatcaacaccgtgcgcgctatcaacgtggccctcggcgcccccgtggaccgctacttccttatggctaaaagggctgtccggggctggagccgcctggcgggcgccacgtatcggggtgtctacggcaccagcctcctgcgccacgccaaggtcgtctgggagatgctcaagtttgaagtggcgctcaggtgagtggccgcggggcaggtgggtggcgggggcctgctccccacccacctgtgacctgtgacctgacccacgcaggctggagaccttggccatgcggctgaccgccctcctggctcgtgctctggtccacctgagcctcgtgcccccagcggaggagctctaccagtacctggagacctagggtgcagccgcccagggccggcggggcccttttcaccttgggctgacggaggtggcggggctagaggtgtagacaccccgagccccgtgggcactcgcactggggggctgtgacagcagctggggccaggaggccgtgtaatgaccacacactcctctcaagcaaa

SEQ ID NO: 680 - DNA, 1413 bp, Homo sapiens
  misc_feature: Incyte ID No: 227742.10
gggtggggcaggaaccagaagtctcgcggcacctttcccccacccccaggtgtgttgcaagtggcctggccctcccccaccgtggggagcagtgctgccagcttcctgggcgcttcctcactttcaggagatggagcctcagggaaagtcccagcggggcctggccatcctggagctgtgggaactggcactgggaatggaggccttggccttgggccccacctgcagagggccagggcctgagccctggggaaaggggaaggggctggtgactccaaaggggaagggactgctcactaccaccaccaaagccagggcaggggtggggtgtgaccacctccctcctcctgctcaggcctagggggtggcaggctggccatcagtgtgggctaaccctgtcctctccctcccagccatgggaacaaggaggtcttctcctgccggggcatcctgctggcagtgaactggtttctggagcggggccacacagacatcacagtgtttgtgccatcctggaggaaggagcagcctcggcccgacgtgcccatcacaggtgagtggtgcctctggaggtgggatggtcttactgccccagcagccctggttctccccaagagagaccctctgggagtgacctacaacttctagaactcaagcagggaccagcatttcttttctcagttttttctgtccttagcaacctgctctgaatggtggtcattggaggtcaccttgtccagtcttctgcctcagatctggagcccctccctcatcctactggtgggcaggtcgctctttcaacatccccagtggcagaagccagttatcacatagtggttaagcctgtgggctcttgagtcgagacagccagagttgggaatcctggctctgtcccctcttggcgccctggcctggacagggacccctcttagccctgctctgagccacatgctcctcatctgaaacatggggtcggtgtcagcagggggtgttgacagcattgccttcctcgtgaggtcatataagttaacacacggtaagtgctgagaagagtacctggcacatggtagatgctcagtgtatgttagctgttaccactgttcttgcaagagcccccagcctttggaggtaaaaactgaatcagtttctctagaagtcttgagatctgggggcagcctgtctgggactgtaggctccaggaagaggggccctttccacttgcacacttctgtgtccctgtggtcccagcagctcccccaggtggggcatggtgagtggcctgaccttttcccaccatgggatttagcgaccttgtcctggcaatgcaagggacagagccaagatacttctcccaccccagagcaagctgcggctcattcacggacccctcagaacaggctggatgaaagccaa

SEQ ID NO: 681 - DNA, 1327 bp, Homo sapiens
  misc_feature: Incyte ID No: 401098.1
  unsure 667: a, t, c, g, or other
tgctaaagtgcttcacccaacagcagcagtatacacatccttttcaagtatccattaaatatatacgatgatagaccatatgctctggaccataagacctcaaaaaatttaaaatcatggaatgtgtgatttttttcaacaacagtggaatcagattagcagacaggaatatcacaaaacacttgggaaataacacttctaaatgatccatgggtcaaagaggaagtctcaagggaaattttaaaaatattttgaacttaatgaaaagtaaaacataacgaatttttttgaggcacaactaaagcaataccgagagggaaactcacagtattaaatgcttatactaaaagacaggaaaagggccaaatcagaaatctaagcttccacctaacctgaaaaaagaagagcaaaagaaacccaaagcaagcggaaggaaggacataataaagaaaagccgagaaatcagtaacattgaacatgagaaaacagtagaggaagtcaacaaaacaaagggctggctctttgaaaagacaataaaattgacaaatagcaagactgacagagaaaaagggaaggcaaaaatttccagtatcaggaatgaaaaggatataactatagatcttgcagatatcaaagggatcacaacaaacaactctgcacatataantttgacaacttagataaacgacccaattctttgaaaagaactcaataggaattagataatttgaatagtcctgtaactgttaaggtaattacatttataatttaaaacctcttgaaaggaaatctccaaatcttgattgtttcactggatacttgtatcaaacattcgaagaacagtgaacaccaggtctgtacaatttcttttcaaaaaaaaagaaaggaagaggaggaaacccatagtcctgtgacactattcttacctgatattaaaccaagacagttcttaaaaaaaacagtatcccttatatgtgtagttggtaaaattctttccaaaatattagcaaatggaattaagcaatttataaaaagaattatatattgtgactaggattgatttccgggattcaagactggtcagtattttaaaaatcaatgagtataatcttccatattaacgagccaaaaaagaaaattcatatgatcatatcgatttagaaaaggtgcttaataaaattcaaaattcacttataataactcagattactaggaatagagggaaatttcctcaacttgattaaaaaacgtatctaaaatatctatagctaacatcatacttcattgtgagagactgctttcttcctagggaatggcacgcttgtct

SEQ ID NO: 682 - DNA, 1265 bp, Homo sapiens
  misc_feature: Incyte ID No: 230233.3
aggagagaggcgcgcgggtgaaaggcgcattgatgcagcctgcggcggcctcggagcgcggcggagccagacgctgaccacgttcctctcctcggtctcctccgcctccagctccgcgctgcccggcagccgggagccatgcgaccccagggccccgccgcctccccgcagcggctccgcggcctcctgctgctcctgctgctgcagctgcccgcgccgtcgagcgcctctgagatccccaaggggaagcaaaaggcgcagctccggcagagggaggtggtggacctgtataatggaatgtgcttacaagggccagcaggagtgcctggtcgagacgggagccctggggccaatggcattccgggtacacctgggatcccaggtcgggatggattcaaaggagaaaagggggaatgtctgagggaaagctttgaggagtcctggacacccaactacaagcagtgttcatggagttcattgaattatggcatagatcttgggaaaattgcggagtgtacatttacaaagatgcgttcaaatagtgctctaagagttttgttcagtggctcacttcggctaaaatgcagaaatgcatgctgtcagcgttggtatttcacattcaatggagctgaatgttcaggacctcttcccattgaagctataatttatttggaccaaggaagccctgaaatgaattcaacaattaatattcatcgcacttcttctgtggaaggactttgtgaaggaattggtgctggattagtggatgttgctatctgggttggcacttgttcagattacccaaaaggagatgcttctactggatggaattcagtttctcgcatcattattgaagaactaccaaaataaatgctttaattttcatttgctacctctttttttattatgccttggaatggttcacttaaatgacattttaaataagtttatgtatacatctgaatgaaaagcaaagctaaatatgtttacagaccaaagtgtgatttcacactgtttttaaatctagcattattcattttgcttcaatcaaaagtggtttcaatattttttttagttggttagaatactttcttcatagtcacattctctcaacctataatttggaatattgttgtggtcttttgttttttctcttagtatagcatttttaaaaaaatataaaagctaccaatctttgtacaatttgtaaatgttaagaattttttttatatctgttaaataaaaattatttccaacaaccttac

SEQ ID NO: 683 - DNA, 347 bp, Homo sapiens
  misc_feature: Incyte ID No: 225344.1
  unsure 282, 335, 341: a, t, c, g, or other
ccagcccagtgctccaaaatactcggcctgggggaggctggtccgtgagcgtgcgcccggaccgttccgccatgcatagtggacccagcactacagcaagcctggcacgacctctaaggcggttcgcggcaacgtccgcacgtcggctcgttggtctaggggtatgattctcgcttcgggtgcgagaggtcccgggttcaaatcccggacgagccctcctttaccttttactgagacaagagtgtcttcaaggaatatgttacctgaccagcgctgcaggangcttgactgtaagtcatcaatgtacagtaagctcttttgtggcaacgcggtanagaaancatctc

SEQ ID NO: 684 - DNA, 1386 bp, Homo sapiens
  misc_feature: Incyte ID No: 1327483.15
  unsure 79: a, t, c, g, or other
cacggagtgccggggtggccgagatgggggacacgtggtggcctagatcttgacaccacccccaacacacacaggcccncctcagtggggacacacagacagacgccacctctttctacgaccgcgtctgggccgccatcagggacaagtaccggtccgaggcactgcccaccgaccttccagcaccttctgcccctgacttgacggagcccaaggaggagcagccgccagtgccctcgtcgcccacagaggaggaggaggaggaggaggaggaagaagaggctgaagaagaggaggaggaggaggattccgaggtgcagggggagcagcccaagccggccagccctgctgaggaagacaaaatgccgccctacgacgagcagacgcaggccttcatcgatgctgcccaggaggcccgcaacaagttcgaggaggccgagcggtcgctgaaggacatggaggagtccatcaggaacctggagcaagagatttcttttgactttggccccaacggggagtttgcttacctgtacagccagtgctacgagctcaccaccaacgaatacgtctaccgcctctgccccttcaagcttgtctcgcagaaacccaaactcgggggctctcccaccagccttggcacctggggctcatggattggccccgaccacgacaagttcagtgccatgaagtatgagcaaggcacgggctgctggcagggccccaaccgctccaccaccgtgcgcctcctgtgcgggaaagagaccatggtgaccagcaccacagagcccagtcgctgcgagtacctcatggagctgatgacgccagccgcctgcccggagccaccgcctgaagcacccaccgaagacgaccatgacgagctctagctggatgggcgcagaggtgggcggggaggtggagtctcgtcggcctgccccagcaaggggaggcggcgggccctgaggaagatggacccacatggccactctatcaacctgtgtccccatgttccctgcttttttgttttgtttttttgaggtggagtctcactctttggcccaggctggagtgcagtgatgcgacctcggctgactgcaacctctacctcccgggttcaaacaattgtcttgtctcagcctcccaagtagctgggattacagaacctcaagaaggcatgaagccagcccctgcagtgccgtccacccgcccctctgggcctgcctgtggctctgttgccctcctctgtggcggcaggacctttgtggggcttcgtgccctgctctggggcccaggcggggctggtccacattcccaggccccaacagccttcaaagatgggtaaaggagcttgccctccctgggccccccaccttggtgactcgccccacc

SEQ ID NO: 685 - DNA, 3048 bp, Homo sapiens
  misc_feature: Incyte ID No: 403121.12
ggcgggagctggagtccgcggagcccacggagcccacggaggagcccacggaggagccccagcgtccgaacgggcagacccccttcgagccgcgaaggagcccgagaagcagccacgatgtgcggaatctttgcctacatgaactacagagtcccccggacgaggaaggagatcttcgaaaccctcatcaagggcctgcagcggctggagtacagaggctacgactcggcaggtgtggcgatcgatgggaataatcacgaagtcaaagaaagacacattcagctggtcaagaaaagggggaaagtcaaggctctcgatgaagaactttacaaacaagacagcatggacttaaaagtggagtttgagacacacttcggcattgcccacacgcgctgggccacccacggggtccccagtgctgtcaacagccaccctcagcgctcagacaaaggcaacgaatttgttgtcatccacaatgggatcatcacaaattacaaagatctgaggaaatttctggaaagcaaaggctacgagtttgagtcagaaacagatacagagaccatcgccaagctgattaaatatgtgttcgacaacagagaaactgaggacattacgttttcaacgttggtcgagagagtcattcagcagttggaaggtgcattcgcgctggttttcaagagtgtccactacccaggagaagccgttgccacacggagaggcagccccctgctcatcggagtccggagcaaatacaagctctccacagaacagatccctatcttatacaggacgtgcactctggagaatgtgaagaatatctgtaagacacggatgaagaggctggacagctccgcctgcctgcatgctgtgggcgacaaggccgtggaattcttctttgcttctgatgcaagcgctatcatagagcacaccaaccgggtcatcttcctggaggacgatgacatcgccgcagtggctgatgggaaactctccattcaccgggtcaagcgctcggccagtgatgacccatctcgagccatccagaccttgcagatggaactgcagcaaatcatgaaaggtaacttcagtgcgtttatgcagaaggagatcttcgaacagccagaatcagttttcaatactatgagaggtcgggtgaattttgaaaccaacacagtgctcctgggtggcttgaaggaccacttgaaggagattcgacgatgccgacggctcatcgtgattggctgtggaaccagctaccacgctgccgtggctacgcggcaagttttggaggaactgactgagcttcctgtgatggttgaacttgctagtgattttctggacaggaacacacctgtgttcagggatgacgtttgctttttcatcagccagtcaggcgagaccgcggacaccctcctgggcgctgcgctactgtaaggaccgcggcgctctcaccgtgggcgtcaccaacaccgtgggcagctccatctctcgcgagaccgactgcggcgtccacatcaacgcagggccggagatcggcgtggccagcaccaaggcttataccagtcagttcatctctctggtgatgtttggtttgatgatgtctgaagaccgaatttcactacaaaacaggaggcaagagatcatccgtggcttgagatctttacctgagctgatcaaggaagtgctgtctctggaggagaagatccacgacttggccctggagctctacacgcagagatcgctgctggtgatggggcggggctacaactacgccacctgcctggaaggagccctgaaaattaaagagataacctacatgcactcagaaggcatcctggctggggagctgaagcacgggcccctggcactgattgacaagcagatgcccgtcatcatggtcattatgaaggatccttgcttcgccaaatgccagaacgccctgcagcaagtcacggcccgccagggtcgccccattatactgtgctccaaggacgatactgaaagttccaagtttgcgtataagacaatcgagctgccccacactgtggactgcctccagggcatcctgagcgtgattccgctgcagctgctgtccttccacctggctgttctccgaggatatgacgttgacttccccagaaatctggccaagtctgtaactgtggaatgaggctgagaccgtgacaagaccatcaccacctttcatctgattccagacctgtcccaacagcagggatgctacatgggaagagaagtggacatcccacatgttctgcgtgctcctgtagagcttgacagcttccacgtgccttctacccaagtgcttttgcttacagcagatactgtttctctgtgtcctgaagtcgccagaggagaagggaatcattgtttacacatggggatcagagcagacttctccactactgtgcaatagagatacagctctcttcagagtaactgtgaaccttttataaccaacactagagttagttttaaaagacaagatatttataatgacgactgtatagcttttaagttatttttctagtatgtggctttctgtagccgtggtaacggccaaactgttcatcctagctacccatgctctgtgtccaggcttgctcctggcaggtggcattcatctcagatgtgagcacaaggcattggccctctggactcctttctccttttctttcctctctaggctgctcctgaatcctgttctctgacatccgtggagccccttctgcatccacctatgcctcctataagtccagttgaaatctcagcctccttcaacattttcttctcgtgtgtggcccacatccctccacttctccaacttctgtttaatctgatcacggctctttttaagccctggcagcattttggtccctgctccttgcccatagtaaaacagcttgaaatatcccatgcaagagagtagtttcaagtgggcaactctgctctctatttaaaagcgtgcacaatcaaaagtactatgcaattttaggacaataaagaacatacagtttttttgtgtgtgtttgc

SEQ ID NO: 686 - DNA, 801 bp, Homo sapiens
  misc_feature: Incyte ID No: 403121.6
atttctgacatctttatgagcttgttatatgtagcatttaatcattgcataatattccatcacaatcttataacacgattttcttaatggttacttagccaatcttctactagttaaactgttcccaaatttttgtcttcataaataacatagcagtgaacatctttgtacatacagtgtgagccaccgcacccggctcagtagaagcgtacttatgaaccattcctacctttccttcccactccaccctaaacaaataagtcccatggaattcatatatattcttgcaagaaaagttaatttttaacagtacacaccaagttacctgtgtttaaaagcatgaaccttattctttaagtcatgttaacagatcatgacacacatcaggtgcacagtaaatgtttattgagggactaaaccttatacggttaaatgaggcttctggactaaggaatctgcctccaagacgcaggtctctaggttggtgaccatggtgaacatctgtctcttgtttttaagtactctgaaaattgtctgtgagaggtagcatgttgctgagatctttggggtcctgaacagtcactttctttcattgtaggttgacttccccagaaatctggccaagtctgtaactgtggaatgaggctgagaccgtgacaagaccatcaccaccttttcatctgattccagacctgtcccaacagcagggatgctacatgggaagagaagtggacatcccacatgttctgcgtgctcctgtagagcttgacagcttccacgtgccttctacccaagtgcttt

SEQ ID NO: 687 - DNA, 1527 bp, Homo sapiens
  misc_feature: Incyte ID No: 201091.1
gagagggcttgccttccctcccgcctgaccttcctcagtcgctgatgcacatgacatgattctcatctgggtgcagaggtgggaggcaccaggtgggcacccgtgggggttagggcttggaagagtggcacaggactgggcacgctcagtgaggctcagggaattcagactagcctcgattgtcactccgagaaatgggcatggtattgggggtcgggggggcggtgcaagggacgcacatgagagactgtttgggagcttctggggagccctgctagttgtctcagtgatgtctgtgggacctccagtcccttgagaccccacgtcatgtagagaagttaacggcccaagtggtgggcaggctggtgggacctggggaacatcaggagaggagtccagagcccacgtctactgcggaaaagtcaggggaaactgccaaacaaaggaaaatgccccaaaggcatatatgctttagggcctttggtccaaatggcccgggtggccactcttccagatagaccaggcaactctccctcccaccggccacagatgaggggctgctgatctatgcctgggcctgcaccagggattatggttcttttaaatctttgcctttcagatacaggaaaaataatggcattaaattgctttaatttgcattattttagttatccagtttgcacatatttttataggtatcttaggcatcgattggtattttttaactgggccaagcccattaaggtctttcttctgttgggtgctatcattttctgattaagtctttttgactattgacatacagtctttcacagatggtggagtgtttttcccccaaatctgttgtttgtcttataatgttgtatatgaggttttatggtgtatgaatatgaatgcttctgtaatgtcaaacagatccctagtaaactccttcttcacttttactgtcagatttacaaaggtcctcccattgcaaagcagtgtttgtcctaatttatatattgtttttctagttcattttgtgtttccaacttttcatgtaaaattttaattatttttgaatgtgtggatgtgagactgaggtgccttttggtactgaaattctttttccatgtacctgaagtgttacttttgtgatataggaaatccttgtatatatactttattggtccctaggcttcctattttgttaccttgctttctctatggcatccaccattttgattgttctacttttatgatatgttttcataagtggttaagcaagtattctcgttacttttgctcttaaatccctattcattacagcaatgttggtggtcaaagaaaatgataaacaacttgaatgttcaatggtcctgaaatacataacaacattttagtacattgtaaagtagaatcctctgttcataatgaacaagatgaaccaatgtggattagaaagaagtccgagatattaattccaaaatatccagacattgttaaagggaaaaaattgcaataaaatatttgtaacataaaaaaaac

SEQ ID NO: 688 - DNA, 328 bp, Homo sapiens
  misc_feature: Incyte ID No: 207747.1
cttacttggatgtctgtaaatccggctggactttcagcttctaagaacagtccgtttctcgaggatccaggcgcaggaggacagagcaatgggtgagagaactcttcacgctgcagtgcccacaccaggttatccagaatctgaatccatcatgatggcccccatttgtctagtggaaaaccaggaagagcagctgacagtgaattcaaaggcattagagattcttgacaagatttctcagcccgtggtggtggtggccattgtagggctataccgcacaggaaaatcctatctcatgaatcgtcttgcaggaaagcgcaatggcttc

SEQ ID NO: 689 - DNA, 287 bp, Homo sapiens
  misc_feature: Incyte ID No: 444663.1
ttctccagacagaccagactctcacagaaaaagaaaaggagattgaaggtgaggagtgagttaagagattagatggcctcaaaagctccaaaaattgaaataacttgactggataaacatgggaccctttaactagagcaagatccacaaaggtgtgtcttacttgccgaggtcatctctgagtagggcatatgcagtcagcaacaacgacaggtaagtgtataaggaacaatgaggcaacaagataaccccacacaaattttcctctttcttttcctccacagtgg

SEQ ID NO: 690 - DNA, 1389 bp, Homo sapiens
  misc_feature: Incyte ID No: 480287.8
agcggcccagctagaaaaaaagcgggatgacttttgtaaacagaatcaggaagcatcatcagatcgttgctcaggtttacttcaggtcattttcagtcctctagaagaagaagtgaaggcgggaatttattcgaaaccagggggctatcgtctctttgttcagaagctacaagacctgaagaaaaagtactatgaggaaccgaggaaggggatacaggtaaccaagatttatctgtcaattatggaaagctgctgacctgcctcctacaaacaccaaggtgaccaagcttcactgcatacagatgtgcttttttgtttgcataacattcatgcttttattcaataacatatgcaaacaggctgttataccagatatgtcctaggtgctcatcaaagagagtgcagtcaattaactattaagttataaattcaattagcagatgaagcacaaagttattattgtcatcattacagctgggcttttcctgttgcaagagacaggaacccaatgatggctgcttaaacaaaaatgtaattcattgatttaggctgcaaactggctttacaggacaggtgggtctaaggtttcaagtaacatcatgaactggctctctgtccagtgttcccccatccccacagttttctccctcccaccatccctctatctgagtcactctgatatttgctttctcaatgatggcttcattccccagcaggctcagcccatatgggaccacagcattaacagttccaaacttagagcccttaatctaaacaggacagagactctccttttcccagtatctatattagcctactaaaaatgactgctaagtaggatgttctgatcggcttgccaggagcatgtgtctgtcgctccgacagggaatttgaccaccaaggacaatagggccaagagaaagaattcccagaggagaaaggatggcaggaagacaaacaggaacacctgcttacagccatttcctacttctcactctgtgttctctgggtcctaaggctgaagagattctgcagacatacttgaaatccaaggagtctatgactgatgcaattctccagacagaccagactctcacagaaaaagaaaaggagattgaagtggaacgtgtgaaagctgagtctgcacaggcttcagcaaaaatgttgcaggaaatgcaaagaaagaatgagcagatgatggaacagaaggagaggagttatcaggaacacttgaaacaactgactgagaagatggagaacgacagggtccagttgctgaaagagcaagagaggaccctcgctcttaaacttcaggaacaggagcaactactaaaagagggatttcaaaaagaaagcagaataatgaaaaatgagatacaggatctccag

SEQ ID NO: 691 - DNA, 844 bp, Homo sapiens
  misc_feature: Incyte ID No: 087978.10
tccacatgtaaggaggcttgtgattatgttgggaccacatgggtaggccaggtgatctccccatttgaaggtcgactgattagcaatctaagttctgcccggaactttaattcctcttttccacggtaatgcattcacagatcctggtgactaggttttggacatctcttgggaggtcattattctgcctgccatcatagaattgttgggaagattaaacaacataatatacatgacgtatgttgaggcacgcttggcacctgggaaatactcaggatgtactaaccattgctcctacacagttcagctcctgaaggagtccaggtgggcttttggcacagaatgaaactatcaggtgtgaggagggtcctagtccaatctcttcttttcaaagatgatacatttgaagcccagggaggactgataatttgcccaaggtcacacagccagtcaaggagggattgctcccttgccagccccagccccacccagaagatgctgggtcatgtaggggtgggcacatgtcttcctggccagatcctgcagctcctgaaaggcaagctggtggtgggtcatgacctgaagcacgacttccaggcactgaaagaggacatgagcggctacacaatctacgacacgtccactgacaggctgttgtggcgtgaggccaagctggaccactgcaggcgtgtctccctgcgggtgctgagtgagcgcctcctgcacaagagcatccagaacagcctgcttggacacagctcggtggaagatgcgagggcaacgatggagctcatatcaaatctcccagagaatccgagcccgccgagggctgccccgcctggct

SEQ ID NO: 692 - DNA, 2484 bp, Homo sapiens
  misc_feature: Incyte ID No: 231486.18
gtttattcttgtattataaccataacagttcactaattaaattaaatttaggaattgaattgttaagttaatttggttttatatttatgtttagcatttatgtggttcaaagatcaaatctacaaaataatgtatagtcaaagaatctatcttccttctctgccccttcaaataaatttctcccctcttcccattagtaaccatataaaatttatattttacttgccttttaaaatatgtaacaaagtacatataaatttgctgctactcccttcttagagaagtggtagaaaactatgttatattgacttatcagacattgtttaactgacatggcatttttctgctacaaatgttccagcagttaataatctttgcatatatcattttgcatttttgtcagtatatcagtgggacagattcccaacagagaagtgctagatgaagagtaaagtcatctcaccttggaccccttccctccttgcgctctgcttgatggtaccagcttttttttctgaatgctcttacttccatctgtgggcagattgcctctcttatctagaacactttcagccatatccttattctctttagcagactcactcctgctattttagctctcagattacatgtcctttcctcacagaggccttacttgactaggtgaaaggactgctggcttacttgcataatgcctgtcttctctaccaagattgttagcctcatactattagagacttttctgttttgtttaccatttgattcacttgcacagtgcctggtacatagtttgtgctcataaatattttttgaattaatatcttgctttatgtctaccttacagtttaatcccatggaatcaatcaaattaaatcatcatgactacattgattccccatcgctgaaggacagaattcattgtgtggcatttgtatttgatgccagctctattcaatacttctcctctcagatgatagtaaagatcaaaagaattcgaagggagttggtaaacgctggtgtggtacatgtggctttgctcactcatgtggatagcatggatttgattacaaaaggtgaccttatagaaatagagagatgtgagcctgtgaggtccaagctagaggaagtccaaagaaaacttggatttgctctttctgacatctcggtggttagcaattattcctctgagtgggagctggaccctgtaaaggatgttctaattctttctgctctgagacgaatgctatgggctgcagatgacttcttagaggatttgccttttgagcaaataggtagatggtttggtggtgtggaagcttggaagcggtcaggtagttggctactttctgcttggatctattaaatacctggcagctctctgtctttttgtgggttgttgccctgtgattagttctgctttttaacccactccctggatgcatttttccctccttgcatttccctcttttcctggagttcatactagagaatctgcactatgtttttccctttttgtcttgagatgaaagttttaaaataatccacctctgtcatttccactctctgaacatcccaagctgtatccctggcctcttttctcagactatgtttctttacttgggacctagaactggattggattggcattgctcctgatcagatgagacctttgattatttgccccttccttaggaccttacactcctgtctttctttgacttgcctttttgtttctttccttcatcttagtccctcttcatgcagtatggtcattgctaggtagaggtatgtccttttatgtaatggccaccgcatttagtattacataaactttcttttaacaatctgtgcatagtacatgctgctctgttccatttagagatttgacagaggtttcagtttagtatactcaaatcttattttagtgcttgggaaatcaattcagaatatcacatcctctccaattctctcttactcaaattgctgggaaactctcatgttactaactttgttgctctaactctgccatcttggtttccccatcccttctcttcctcatggtacgtgtgctcctaatattagcgttggttgagattttcagtggtccaatattcctcttccctctggttgcctttcctgagataatccactaagaatattttgtgtttcttttctcagggaatctaagggaggaaattatcaactgtgcacaaggaaaaaaatagatatgtgaaaggttcacgtaaatttcctcacatcacagaagattaaaattcagaaaggagaaaacacagaccaaagagaagtatctaagaccaaagggatgtgttttattaatgtctaggatgaagaaatgcatagaacattgtagtacttgtaaataactagaaataacatgatttagtcataattgtgaaaaataataataatttttcttggatttatgttctgtatctgtgaaaaaataaatttcttataaaactc

SEQ ID NO: 693 - DNA, 2593 bp, Homo sapiens
  misc_feature: Incyte ID No: 086533.6
tgaggggaaatccctgtgtgcatatgtagaaatgtgtttaagctcagtgaatttaagcagcttttttggcacagttgaattgaaggaaataataagacataaatctaagacgttgttaattgtcaggttttcgtacattgagatctttgaaagaagttgttttgtgccttcttaggtaagcggaattgatagactttaaaatttctatgtgaacataaaaccattggtttaaaaagctaaaagtgcatcatttatcacttgctccccaaagtttttccaaagtcaagaataattatagaactatgagagtcaggatggcaaaatctgtcatccattctcatgggtggttagggctgagaaaaaaatgtgatccactctcatgggtggttagagctgagagatagagaggcttaatttgggtttacctattggctctgaggatccttgaccaaatttttatgaactttaatttcttagggtacccagtggagaaaggtatcaggcaacttaggacctttgagcagagctcgggactcacaaggccattgattgaccagagcaagttggaaaggttttgcaatgtgctgcttggggactttatacattaggcaacagctatacttttgggattattaacgtttatgtctgtgaagatatttaaccaggaatatgttttgttttcttttgaacagttgagccccatatgggggttggcaggcagcagagaggcccctttcaaggtgttcgggtaaagaactcagtgaaggaactcctgttgcacatccgaagtcataaacagaaggcttctggccaagctgtggatgattttaagacacaaggtgtgaacatagaacagttcagagaattgaagaacacagtatcatacagtgggaaaaggaaagggcccgattcgttgtctgatggacctgcttgcaaaaggccagctctgttgcattcccaatttttgacaccacctcaaacaccaacgcccggggagagcatggaagatgttcatctcaatgaacccaaacaggagagcagtgctgatctgcttcagaacattatcaacattaagaatgaatgcagccccgtttccctgaacacagttcaagttagctggctgaaccccgtggtggtccctcagagctcccccgcagagcagtgtcaggacttccatggagggcaggtcttttctccacctcagaaatgccaaccattccaagtcaggggctcccaacaaatgatagaccaggcttccctgtaccagtattctccacagaaccagcatgtagagcagcagccacactacacccacaaaccaactctggaatacagtccttttcccatacctccccagtcccccgcttatgaaccaaacctctttgatggtccagaatcacagttttgcccaaaccaaagcttagtttcccttcttggtgatcaaagggaatctgagaatattgctaatcccatgcagacttcctccagtgttcagcagcaaaatgatgctcacttgcacagcttcagcatgatgcccagcagcgcctgtgaggccatggtggggcacgagatggcctctgactcttcaaacacttcactgccattctcaaacatgggaaatccaatgaacaccacacagttagggaaatcactttttcagtggcaggtggagcaggaagaaagcaaattggcaaatatttcccaagaccagtttctttcaaaggatgcagatggtgacacgttccttcatattgctgttgcccaagggagaagggcactttcctatgttcttgcaagaaagatgaatgcacttcacatgctggatattaaagagcacaatggacagagtgcctttcaggtggcagtggctgccaatcagcatctcattgtgcaggatctggtgaacatcggggcacaggtgaacaccacagactgctggggaagaacacctctgcatgtgtgtgctgagaagggccactcccaggtgcttcaggcgattcagaagggagcagtgggaagtaatcagtttgtggatcttgaggcaactaactatgatggcctgactccccttcactgtgcagtcatagcccacaatgctgtggtccatgaactccagagaaatcaacagcctcattcacctgaagttcaggagcttttactgaagaataagagtctggttgataccattaagtgcctaattcaaatgggagcagcggtggaagcgaaggcttacaatggcaacactgccctccatgttgctgccagcttgcagtatcggttgacacaattagatgctgtccgcctgttgatgaggaagggagcagacccaagtactcggaacttggagaacgaacagccagtgcatttggttcccgatggccctgtgggagaacagatccgacgtatcctgaagggaaagtccattcagcagagagctccaccgtattagctccattagcttggagcctggctagcaacactcactgtcagttaggcagtcctgatgtatctgtacatagaccatttgccttatattggcaaatctaagttgtttctatgacacaaacatatttagttcactattatatacagt

SEQ ID NO: 694 - DNA, 1385 bp, Homo sapiens
  misc_feature: Incyte ID No: 2634391CB1
gccaaccattccaagtcaggggctcccaacaaatgatagaccaggcttccctgtaccagtattctccacagaaccagcatgtagagcagcagccacactacacccacaaaccaactctggaatacagtccttttcccatacctccccagtcccccgcttatgaaccaaacctctttgatggtccagaatcacagttttgcccaaaccaaagcttagtttcccttcttggtgatcaaagggaatctgagaatattgctaatcccatgcagacttcctccagtgttcagcagcaaaatgatgctcacttgcacagcttcagcatgatgcccagcagcgcctgtgaggccatggtggggcacgagatggcctctgactcttcaaacacttcactgccattctcaaacatgggaaatccaatgaacaccacacagttagggaaatcactttttcagtggcaggtggagcaggaagaaagcaaattggcaaatatttcccaagaccagtttctttcaaaggatgcagatggtgacacgttccttcatattgctgttgcccaagggagaagggcactttcctatgttcttgcaagaaagatgaatgcacttcacatgctggatattaaagagcacaatggacagagtgcctttcaggtggcagtggctgccaatcagcatctcattgtgcaggatctggtgaacatcggggcacaggtgaacaccacagactgctggggaagaacacctctgcatgtgtgtgctgagaagggccactcccaggtgcttcaggcgattcagaagggagcagtgggaagtaatcagtttgtggatcttgaggcaactaactatgatggcctgactccccttcactgtgcagtcatagcccacaatgctgtggtccatgaactccagagaaatcaacagcctcattcacctgaagttcaggagcttttactgaagaataagagtctggttgataccattaagtgcctaattcaaatgggagcagcggtggaagcgaaggcttacaatggcaacactgccctccatgttgctgccagcttgcagtatcggttgacacaattagatgctgtccgcctgttgatgaggaagggagcagacccaagtactcggaacttggagaacgaacagccagtgcatttggttcccgatggccctgtgggagaacagatccgacgtatcctgaagggaaagtccattcagcagagagctccaccgtattagctccattagcttggagcctggctagcaacactcactgtcagttaggcagtcctgatgtatctgtacatagaccatttgccttatattggcaaatctaagttgtttctatgacacaaacatatttagttcactattatatacagt

SEQ ID NO: 695 - DNA, 717 bp, Homo sapiens
  misc_feature: Incyte ID No: 1095625.6
ggagccccggggagtcggcgctgctggacgggtggctgcagcggggcgtgggccggggggccggcggcggggaggccggggcctgcaggcccccggtacgacaagatccggactccggcccggactacgaggcgctgccggctggagccactgtcaccacgcacatggtggcaggcgccgtggcagggatcctggagcactgcgtgatgtaccccatcgactgcgtcaagacccggatgcagagtctacagcctgacccagctgcccgctatcgcaatgtgttggaggccctctggaggattataagaacggagggcctatggaggcccatgagggggctgaacgtcacagcaacaggcgcagggcctgcccacgccctttattttgcctgctacgaaaagttaaaaaagacattgagtgatgtaatccaccctgggggcaatagccatattgccaatggtgcggccgggtgtgtggcaacattacttcatgatgcagccatgaaccctgcggaagtggtcaagcagaggatgcagatgtacaactcaccataccaccgggtgacagactgtgtacgggcagtgtggcaaaatgaaggggccggggccttttaccgcagctacaccacccagctgaccatgaacgttcctttccaagccattcacttcatgacctatgaattcctgcaggagcactttaacccccagagacggtaca

SEQ ID NO: 696 - DNA, 1496 bp, Homo sapiens
  misc_feature: Incyte ID No: 1095625.7
  unsure 1437: a, t, c, g, or other
accctgcggaaggtaatgattcctcaacctatcactctgtgggcagctgcacctgtatttctttacagtttgcagaagaaagcacatcagttttggtgggaaattctgttaccttgttttaccactagagggtgctccctccatgtttttggtacctaacgaggcaccctcttggacaggaagcagattcactgggattttactaatccctggggcttccctagaaaaagatgtctccatgtggcctgtttttgggctttcctgggagtctcctttgtcgtagatttgatctgtcctgaaagtttagcagattcatttttcttcaaagaggtgaagatggattctgactttttttttcccccttatgatttgcaggaattgacacttaaatatattgcctttcttattggaatgaagctagttgggataggaatgaaaggttaaatcatagaactcagtccctgcatttctgctgggatcttggcttttcagtcggaggaaaattctccaaaaacattctccatgtgaggatgagcaaatatgaagggatagcattgttgccacgttcattttctgtctgggcaaggccatggggtggaaagagccaaagctaagctgaagctccacagagctcacaccatgttatctacttgagggagtgggaggtgtttgaagactaaagccaactctttttggctaagaatcttttctttggtagaacttctgtctcctcccctctaggaggatcaccatctcacattttaaaagttaggtgctctttgtatgcgaggattgggattgttaggggcctgtgttcgtgatgatcactatcatggagtcatttcttgttgggaattgttagagggtaagatcagagataggtacttagttcaagaagactctctgaagctcccaaactgtagatatgtcctgtgtgcgaactggctggctttacagaagtcctgatggaagtgggtttattgttttttgactcgttaccaaccctctgcttactccttcccctcaaaaaagggaagctgacttctcaggttagccagcagctcactcatacttttttctctctctattccattggctgatctgctgacttggggctctgaatctggatactctccatcaccggttggctgctgtcaccatttccttcctcgttgatggcactactagtggtcaagcagaggatgcagatgtacaactcaccataccaccgggtgacagactgtgtacgggcagtgtggcaaaatgaaggggccggggccttttaccgcagctacaccacccagctgaccatgaacgttcctttccaagccattcacttcatgacctatgaattcctgcaggagcactttaacccccagagacggtacaacccaagctcccacgtcctctctggagcttgcgcaggagctgtagctngccgcagccacaaccccactggacgtttgcaaaacactgctcaacacccaggagtcctt

SEQ ID NO: 697 - DNA, 499 bp, Homo sapiens
  misc_feature: Incyte ID No: 267153.2
gagatatctagtttcaaagcctggcactgtttcttcctaacttggttaaatcaaaatttacttcatttctgcatctataaaatgagggctgaatacacctaccttattgttgggaggaataaataagatggtgaatgcaaagccctgcgacagtgcctggaacacagtaagcatggcagctcacagcttaccaagcacaaatttagtacggtggagaagcagttgtctttagaacactgtgcctcattattttgtttccctaaagtagaaagatttccttaagtaagacataaggcaaatattcaaaatttctcataaacataaatttttgcaaaatgatttttaggattacagatgctttcctcaaagcagatgactacatagagattacaggtgctggaggaaaaaagtatcgcatttctacagcaattgacgacatggaagcctatactaagctgacagataacatttttctggagattttatactctactgatcc

SEQ ID NO: 698 - DNA, 1542 bp, Homo sapiens
  misc_feature: Incyte ID No: 267153.6
ttttttaaaaactatttttaatagttctatcaagtcagatccagtgtagttcaacagaaaaaatttaacatgggggtgagatacaaaagttttggcagagctaaatgagcatagaggacagtgattcaacagcaggaagctgctaccacctctaggataggagagaccaagggagcaggtgggagtccaggagctggggccacctgcaaaagctagaaccacagaatagtcactgccactgccgctcgtgccagaggaggtagggagagaaaaaacctgacttctctgccctcttctcacctccagtctcccaccagagcctcccactgaccaaatctaactggaaaccaacaggcatgggagctgagaaatgtaatttaccggagtagctcctgtgagacagagtagggagaggaagagtgaagaatggatctgagagcaaataagcagatgaggagcacgaatcctcccaccagcattgtattcctggtacaacagaggctctccaagatcgtgcatcatcttgtaaccaaagaagatctacccacaagttcagaacagtttagcatagagtcaagtattaggaggccttgcttcttacctctatggtttcacgtcattgtatcgcctccctttggatctctcccttattttgggtggaggagcttctttggctggagcctatgctgatgggaccaacgttagagctttgatgcagagaaaaatttaaattctgcaggtacatactgttcttcctccccttctttgccatcttgtagacctgggccttttattgcagaggggaccaggcgagagagaagctaggggttcagtgcatcccgtctttctcctgggaaaacaggacagagtttgtgctccgtgaaggtgtgtgaaggaggccatagaggtgggcagtggtatgctgctcccagtcatctctgcagaggccagtggctgttttcatgaaggctcttcctgcgtaagactgtagtgtttctaatttgccccaagcacagggcatatgtaatttggagtttccctggattgaggacagctagaagcaatctatatgcaagatgaggatgtgcgcacttgagactttcactcagaaataagatgatggaaactggcttttctctattgcctgtttttctctctcttcctaataggatggcgatgttatagccccactcataacacctcaaaaaaaggaatggaacgacagtacttcagtccaaaatccaactcgcctccgagaagcatccaaaagcagagtccagctttttaaagatgacccaatgtgaatgtctgtagtcagttgtttacaaactccctctcctgcacaattcatttagaggcttcaatcatagaattctgcaaattaatgacaactcatgctttaattttgtattttgaatgtacacgcatgctgaagctaagtaacttttaatcaaagaaataagatggtattaggcaaatcttactatactatgaaaagcattaccttgcctatttttaatattattaaagcctttctccttc

SEQ ID NO: 699 - DNA, 2672 bp, Homo sapiens
  misc_feature: Incyte ID No: 331451.18
gcggccacggggaatggttgcaatggcggaggcagaggcaggggtggcagtggaggtccgtggactgccccctgccgtgcccgacgagctgctcactctctactttgaaaaccgccgacgctctggagggggacctgtgttgagctggcagagactgggctgtgggggcgtcctcaccttcagagagcctgcagacgccgagagggcctgtggggtctgcaggcccagtggagacctctaaggggttgctggggcaggagggcctggtggaaattgccatggactcaccagagcaagaggggctggtgggtcccatggagatcaccatggggtctctggagaaggcagggcctgtgagcccaggatgtgtgaagctggcagggcaggagggcctggtggagatggtgctattgatggagccaggggcgatgcgcttcctgcagctctaccatgaggaccttcttgcgggcctgggagacgtcgctctcttgccacttgaaggaccggatatgactggctttcggctctgtggagcccaggcttcctgccaggcggctgaggagtttctgcggagcctgctgggcagcattagctgccatgtgttgtgcctggagcacccgggcagcgccaggtttctcctgggcccagaagggcagcaccttctccaggggctggaggctcagttccagtgtgtctttgggacagagcgcctggccacagccacgttggacacaggccttgaagaggtggaccctaccgaggccctcccagtgctccctggcaacgcccacaccctgtggaccccagacagtacaggtggtgaccaggaggacgtgagcctgggtagggctccctgggagccctcagcacatcctgtggccctcacttgacctcaccccctgccctgctctgtgctcccatctgtctactgacccatcttaggcccaccctgtaccctaaaaacttgctccccatctttcatccattccaactcctcctgggtccagcccctgacccaatggcctctccctgcccccagaggaggtccgagaactgctggccaccctggagggcctagacctagacggggaggactggctgcctcgggagctggaggaggaagggcctcaggagcagccagaggaggaggcgaccccagggcatgaggaggaggagcctgtggcccccagcactgtggcacccaggtggctggaggaggaggccgctctgcagctggccctccaccggtcactggagcctcaaggtcaggtggctgagcaggaggaggctgctgccctgcggcaagccctaaccctctccctgctggagcagcccccgttggaggcagaagagcccccagatggggggactgatggcaaggcccagctggtggtgcactcggcctttgagcaggatgtggaggagctggaccgggcgctcagggctgccttggaggtccacgtccaggaggagacggtggggccctggcgccgcacactgcctgcagagctgcgtgctcgcctggagcggtgccatggtgtgagtgttgccctgcgtggtgactgcaccatcctccgtggcttcggggcccaccctgcccgtgctgcccgccacttggtggcacttctggctggcccctgggatcagagtttggcctttcccttggcagcttcaggccctaccttggcggggcagacgctgaaggggccctggaacaacctggagcgtctggcagagaacaccggggagttccaggaggtggtgcgggccttctacgacaccctggacgctgcccgcagcagcatccgcgtcgttcgtgtggagcgcgtgtcgcacccgctgctgcagcagcagtatgagctgtaccgggagcgcctgctgcagcgatgcgagcggcgcccggtggagcaggtgctgtaccacggcacgacggcaccggcagtgcctgacatctgcgcccacggcttcaaccgcagcttctgcggccgcaacgccacggtctacgggaagggcgtgtatttcgccaggcgcgcctccctgtcggtgcaggaccgctactcgccccccaacgccgatggccataaggcggtgttcgtggcacgggtgctgactggcgactacgggcagggccgccgcggtctgcgggcgccccctctgcggggtcctggccacgtgctcctgcgctacgacagcgccgtggactgcatctgccagcccagcatcttcgtcatcttccacgacacccaggcgctgcccacccacctcatcacctgcgagcacgtgccccgcgcttcccccgacgacccctctgggctcccgggccgctccccagacacttaaccgaaggggccaccctctggcctcctgcttcccaggctcccagctccgcacaggctgatgctccccgcccccaactgtggccgcctgagctgtccccggggacgcccctgcctccctctgcgggctccagaaggcggtgtgggggatggcggtcagcagcggccgagaggggctgggctaggtcccagcctgggccgaccccaccaccaggggtcagcagagcccaggaggcgacaccgcccgcccgccgctcccagacctcgcccgagtcggctctgttgtttgaataaacgtgaacgtgaacccaggcggaagggacccggaaaaacaac

SEQ ID NO: 700 - DNA, 1385 bp, Homo sapiens
  misc_feature: Incyte ID No: 903616.5
  unsure 69: a, t, c, g, or other
gctaaatgtgaaaaagtacctgtactataaataattctaagaccttgaattggttggtgacgtcagttncattactattacaggtaaatgtctctggaaaagtgacatgataactgctccttgagacacaaagctgcagggcacatttatataattaattacaccacagaaacacgcacataaacctagagtaatttggtcaaatacacattaagatcacctttatttgcattctcaggataaatctgtctcttgacacgtttcatcttgggtacaggtaagagtacgtcagcaggttttattctggtctttgaagaacaaaggcatgagtgtctggctaaatgaatgagcctataaatctgtgttttataacatattgtacttccagtctgaacaaaacagtgcttattaaatgagcaatgtacaaatggttcagttaatttgttaaaggagtaaggaatcactacattaagtaataaaaatcagactaactgttgggggggacctaacttaaatttgcttagtgttttgttctttttcagtctcttaggttttaaactctctggaacaggtgatttcatcctatttcttcagaatatctcttcacagtctaaaggaagatagggatttagagatggggttgagtaagcaaggaagaaaggccagcatgtgaaggggctgtcaacggctctgggagctcattctactcaagtagagtgaggagcatcacttagtagttcagagtgtaggccctggaggtagtctgcctgtgttcagattcctactccgttcactaatcatgtgactttggagacattacttaacctgtctgccttagactcctcatcggtgaagcaaggatgatagcagtacctaattttttattgtctgcatggtctaaataagctcttaaaacagggccctacctcatagtaagcactgaagaaatgttagccattgttgttagttaacaattgtttcattgcagatacccattgacaacatgaccaatgagatggagcaaagggttgaacctcataatgattacttcagtactcaatttctgttgaactttgctatccttggaacacacaacattacagtggaatcttctgtgaaagatgccaatggtatagtatggaagactggtcccagaactaccatatttgtaaaatccctggaagacccttattcccagcaaattcgcttacaacagcagcaagcccagcagccattacagcagcagcagcaacgcaatgcctacacacggttttaaccatggaatgaatgcactgcagactctcaagagatccatcaaattgccagaaacagtttggtttttcatatggaataagtattaaagttacagtgtagttcaaaaaaaa

SEQ ID NO: 701 - DNA, 1987 bp, Homo sapiens
  misc_feature: Incyte ID No: 990353.15
aggattacaggcatgagccactgtgcctggccatttccttctgttcctagttttaggcaccactcttgcctttccctttttcgtttgtcctcaatccagatggagaccaggtgctcaccctccttcatgcagcaacacttcctgtactttaaggtggatgcctgaaggagggcagcttgaattttcttcttcagagaatttgcccacagttctcttcctctttccattaatttgtccagtcacaatgcaaacctttgttgagactgcactaggcttggcatagtgtttgccatccacaggtggtttcatgtatattgtcttaatcttcccagaagctgtttgaaataggaattatttctgtcaccagatttagaagcagaggggcttgcccaaggcagagtcagctcccatgactcccagcactgatgcattcatgccaggctgccctgtttctgcatccagcccttaagccgtgttgctggcactgtgcaagtgcctcctgtctctgaaagctgcctctgatccaagtggaaagggcccaggaccaatcgtgaagttcactttctctctttgtattcatagaggtcctgggcctatgtcaagaagtgcaaaaacaacatgtgtccaaatcggggattggtgagccagctgctggaatgggagaagactatccttggagattccatcacaaacatcatggatccgctctactgatcttctccgaggcccaccgaagggcacggtcttgctgtgtctctcaggctggagtgcagtggcgcaatcatggctcactgcagcctcaacttccctgggctcaagcgatcctcccacctcaacctcctgagagacccatcggctctaccgcctgaagctggaggagctgaccaaacttcagaacaattgcaccagctccatcacgcggcagaagaagcggctccaggagctggccctcgccctgaagaaatgcaaaccctccctcccagcagaggccgagggggccgcacaggagctggagaaccagatgaaagagcgccaaggcctcttctttgacatggaggcctatttgcctaagaagaatggattgtacctgagcctggttctggggaacgtcaacgtcacgctcctgagcaagcaggctaagtttgcctacaaggacgagtatgagaagttcaagctctacctcaccatcatcctcatcctcatctccttcacttgccgcttcctgctcaactccagggtgacagatgctgccttcaacttcctgctggtctggtactactgcaccctgaccatccgggagagcatcctcatcaacaacggctcccggatcaaaggctggtgggtgttccatcactacgtgtccaccttcctgtcgggagtcatgctgacgtggcccgacggtctcatgtaccagaaattccggaaccaattcctctccttttccatgtaccagagcttcgtgcagtttctccagtactactaccagagcggctgcctctaccgcctgcgggcgctgggcgagcggcacaccatggacctcactgtggagggcttccagtcctggatgtggcggggcctcaccttcctgctgccttttcttttctttggacacttctggcagctttttaacgcgctgacgttgttcaacctggcccaggaccctcagtgcaaggagtggcaggtgcttatgtgcggctttcccttcctcctccttttcctcggcaatttcttcaccaccctgagggttgtgcaccacaagtttcacagtcagcggcacgggagcaagaaggattgaggctgggccttcccctgccggcccagaggggcttctgtcctgtgtgttgtgggaggggatgggaggcgcccctcgagtgtgcgtgtatcagggggtctcttctattctcccttgggttttatgggcgctgtgggccctgaaggaagacctgggcccagtgccctcaataaagagaggcccagaggtgagaaa

SEQ ID NO: 702 - DNA, 1345 bp, Homo sapiens
  misc_feature: Incyte ID No: 087978.5
  unsure 406, 477, 1342: a, t, c, g, or other
ggcaggtatgcagaggcacagcgcagacgacgccaccatgctacctgcttgctgattaatgatagggtgtccaagccaaaaaataaaactaaacattaaaaaataaaacaatacagcgtaataacggcaacaagaaaaagcctttttgagctgggccgtctaaccaggtgtccccaacaccctgtctggagtgcctggaaaaggagcccctgtgagaacaggaagtcctctctcgacagagggacaccaagaaaacgcagccaggtccaacagcccgctggctcccatgctgggtaccggccaggacaccagggctgagcggggcatgcgaagggagatgaaaggtgactgcagtgaggatttgccctgtgtatcgcctctgcaagatccacatctcagctgcaanaactggctggcttgtgtgtgagcctcagttttatcatcagtaaaatgggggataatcatatccagctcagnggtttaacttcagcctagtgcacggaagacatggtaaatggtcatcgcttctcccttgaatggaccgagggcccccgactcccatagcactaccccataaagtctaggctcccgacttcggcattcaaggccttcagtgataaatccaggcccaccatccgtccccacaccacctttcacacaccccctgcccccaccctcgcaggcctcttattttagctgcacgtgctctccctgcctccgaaatgcttgcggcctttcctttccatttattgacgcccttgtgttctctgtgagcagcccttccctgtgtccctagctggagttcctcactccctcctcagtgtcctgaagcttcttgttagagctgctgcagccactgcgtgtgtctgacagcaagtctgcagcctctgcctcccttgcgggactgcaggtgacttgaaggcacagcctggttcccaggaggctggctttcgtgccactggccccagggctgaaggcaggccagctccagccacctgctgagtctcctaagtccagagtgtcagagacctcaagagactctcacccactgacccacctggggactctggaaatcgggatgtgaccagggaagacccctgtcacggggcctctgaattcagcctcatcccaagtccccactctatacttgtgtctgcagaacagcctgcttggacacagctcggtggaagatgcgagggcaacgatggagctctatcaaatctcccagagaatccgagcccgccgagggctgccccgcctggctgtgtcagactgaagccccatccagcccgttccgcagggactagaggctttcggctttttgggacagcaactacctagnttt

SEQ ID NO: 703 - DNA, 4576 bp, Homo sapiens
  misc_feature: Incyte ID No: 253534.17
  unsure 447-553, 849-884, 2279-2313, 2590-2886: a, t, c, g, or other
aatccctggatatttttagtttaccagttagatttgatttgataccactttttcttgccatttatattttcagaaaatttagaatggtattgtgtttagaaaaatgtgcaagattatttttgtaaaataatttagagggttttttttcctgctataggccataaaattttgagtagaaaaatccagaaatttgaaaatcagtatcgtggtagagagctgccaggctttgtgaattacaggacatttgagacaatcgtgaaacagcaaatcaaggcactggaagagccggctgtggatatgctacacaccgtgacgggtgagtgctcagtttcacctctgagcattgatttctaaagaaaggaaaggttcgaaccaaagccagcaccaaacttcagcactttcctcctggggtgcatcccacaccaacgagcaaacctctcattctcnnnnnnnnnnnnnnnnnnnnnnnnnnnnnnnnnnnnnnnnnnnnnnnnnnnnnnnnnnnnnnnnnnnnnnnnnnnnnnnnnnnnnnnnnnnnnnnnnnnnnnnnnnnactacaaatgccggtcacaagtcccagacctcctattcttctgatggactgtttataaatcaaggttcttgcgacccattcctcaggtcaaccaagaactctggaacacacttcactgacatttactggtctattagaaaggatttgataaggggcacaaatgaagctgttggagaggcacatagtgggggcctgaacacagaagcttctgtccccacggggttgggggcaccaccctcatggcacagagatgtggtcatcaaccagggagcccttggaacctcaccacggagaannnnnnnnnnnnnnnnnnnnnnnnnnnnnnnnnnnnggattgactcaatctccaggccctccctcctctgtggagctggaagttctaagtttctagccaaggcttggtctttctagtgcccggccccaatcctgaagctatgtaggggcccaccaggcatcatctcttcaaaacacgagatactcctaaggctggacattccaagagatgtaggggctctatgttaggaaatggggacaaagacaaaatatttatatttttcctatcacaccacacctcccatctgctccactgctatgctggcttcacactcaaaatcggctgtttatttgaaatctccgaggagtaaagccaatggttccataactgcacgtgtagatgtgtttggagccttttggagtgctgtaggaatctaggtgtgtcacggataggtaggaaactagatcctactgtggatccactcccttcttgaaatgctttgctttcttggttttccaggtattaaatctctattcttcatcctctccttgactgacagtatccttactcacacttcagctgcctcatcttagcagtaattaataatcactcatggatccatgaactaaggagctggagatagcctcagaacagctcattcagaggtgtatttccagtaaaattgaccttttagccctaataatcatataccaaaacctgcaatcatgttgttttggtccattgtagactcttaactcattccagaggaaagtttataatacttagagccttatagtcataaaaatcaacatagatatacctatttctttttcagaaatgtatgacatggagatcaataagaggttttcaatcataaagatactataccttgtattacaataaaattatgtgaggaagtagaatagaaatgagtttcaaaaataaaagataaataatataaattttttaaactaagagcttgttcttgtatttttttaaaatggataatgtagacactcaaattccattgatatatttaagagtgatttgacttatattaagagttgtattataaaatattaatatttataatttaaaagaaattacattctttgcagctatttaggataaaaagtttaaatatcaaataaatgtatgccaggggtcatttgcttttaagattcttccagcaaattattaagcaaaaagagcatgccttggctttttcatggtaaagagaagaagggagcagggagaggggaaactttacttcataccatttgatcctcatatttttttgcatcttaagaagagaacaaatgatcctaccaatattgaactatttttctctctttgattagatatggtccggcttgctttcacagatgtttcgataaaaaattttgaagagttttttaacctccacagaaccgccaaggtaaaaccaaccannnnnnnnnnnnnnnnnnnnnnnnnnnnnnnnnnngcttgacactagaaaatagatttcttggatgaggattatttcaactttattgtatacttttagaacagcaaataacatcactcactagtgcttcttctgatgttaccggtgatgtctggttaaaagcaataaaggagggagtgcttaaacgcacagaacaagagatccacagttagcggagaagattatcacatctaagggcaatggctccaaatccagaaactcactgaggaaactacatataaaaatagaatatttctggcccgagtgggcatgnnnnnnnnnnnnnnnnnnnnnnnnnnnnnnnnnnnnnnnnnnnnnnnnnnnnnnnnnnnnnnnnnnnnnnnnnnnnnnnnnnnnnnnnnnnnnnnnnnnnnnnnnnnnnnnnnnnnnnnnnnnnnnnnnnnnnnnnnnnnnnnnnnnnnnnnnnnnnnnnnnnnnnnnnnnnnnnnnnnnnnnnnnnnnnnnnnnnnnnnnnnnnnnnnnnnnnnnnnnnnnnnnnnnnnnnnnnnnnnnnnnnnnnnnnnnnnnnnnnnnnnnnnnnnnnnnnnnnnnnnnnnnnnnnnnnnnnnntttccatccagagtgaggaaagagcctacaggaaatgagcctgggggacagactgggccaagagaccagacttagccactcttagaaataggtgtccccggcacagatgaggagcctggccccatgattcaccagctggaggccttgggatgtgccacttccagcctgtgcccctgactcctcattcataaaagaagactgataaggccttcctcagaaggttgagatggacgtggagtaagatgtttaggatgcacctgccactgtgcactgtgcctctcctcaaggcctggagggtccaggggtgaagtttctcctcctcaggttttggcaaccagtttctctaaaccccgggaacataaaacataattttctgacttaaacatggctttcctgctcatccctgtggattatctgatggatatgacaatcctcgccatcagatatagaagcccctaaaagagaaaggaaagaagctgagttacggggcctgaaagcaagcctgtgcaggtccccaggccccgggatgggggtccggcccatctgtggctcaagcctcctgggaagctctgaccctcagccagggctagaaacctgccttagatacaccaggcgcggcccagagggctgttccaggaaacgtgctgtttcactcacgttgggtaacctggtatttacggacttcttacctactttcctgtgactcaggaatttgtgtcttgagggaaactgtatttatttattttttactgtagtccaaaattgaagacattagagcagaacaagagagagaaggtgagaagctgatccgcctccacttccagatggaacagattgtctactgccaggaccaggtatacaggggtgcattgcagaaggtcagagagaaggagctggaagaagaaaagaagaagaaatcctgggattttggggctttccagtccagctcggcaacagactcttccatggaggagatctttcagcacctgatggcctatcaccaggaggccagcaagcgcatctccagccacatccctttgatcatccagttcttcatgctccagacgtacggccagcagcttcagaaggccatgctgcagctcctgcaggacaaggacacctacagctggctcctgaaggagcggagcgacaccagcgacaagcggaagttcctgaaggagcggcttgcacggctgacgcaggctcggcgccggcttgcccagttccccggttaaccacgctctgtccagccccgtagacgtgcacgcacactgtctgcccccgttcccgggtagccactggactgacgacttgagtgctcagtagtcagactggatagtccgtctctgcttatccgttagccgtggtgatttagcaggaagctgtgagagcagtttggtttctagcatgaagacagagccccaccctcagatgcacatgagctggcggggatgaaggatgctgtcttcgtactgggaaagggattttcagccctcagaatcgctccaccttgcagctctccccttctctgtattcctagaaactgacacatgctgaacatcacagcttatttcctcatttttataatgtcccttcacaaacccagtgttttaggagcatgagtgccgtgtgtgtgcgtcctgtcggagccctgtctcctctctctgtaataaactcatttctagcagaa

SEQ ID NO: 704 - DNA, 2160 bp, Homo sapiens
  misc_feature: Incyte ID No: 1327121.5
  unsure 958-959, 965, 969, 976, 978, 980: a, t, c, g, or other
cctttccatctatcttctattttaaaagaatgtgatttattgtttttatgaataaaatatacctcgtgtgtttctcatatgatgttccattacattaatcatccattaagtaaatgtttttgtgttgcaaaattcatggcagggaatggtttaaaagcaaatactgtaagtctataaaatacattaatacatatacacttcaaaatcaccatacctttttcaggccagaggagggagaaagactagaaggtatttcggaagcctttaaaagaaagcaaggtttcaatcccacctgtcttttctgcagttacttataaatcatatttagacctctccttatatcctaagagattccaggatcccctagagttcatttcagttatttgtaagagcttcattttagcatagttattggaacaggatttgttttttaaaacacacacacacagagaaataaaggagaaattttagcatttaggaaatgctgcacattgagttcttagtgttttgattcagattcactaaaattgctttattatttaaaaaaaaaacaccataaatcagattttcctttttcagcagagattctaatagaagccttgggaagaactttatgtattacttggtattatgccaagtgggatcttgttattttcgttaggggctttgagcaccaggtttaccagatagaagacgctgagagtggtggctcacagtaattctctcctccctgtcatgcacctctccatgtcccctttcctcctttctcactttagccgtaatcctccaccagggacgtttactggggctgaggggtaagtgcagattctgaaccaaactcttcttcctggcttctaatagccactgtaaggctgttaccactcctctagaataccctcttgaatgttcctaaatgttatccacttgcagtcactgcatcgcagcaggtgtctttttnntttttnaaangtttgtnananggccaccaaactgctcagcagcttagtctatttatcatcttttgttgcagctgaactttctttcagactttgttttccttccagtataaacatgaaacatctcttaaagctgtcattaatttacatcgtttactcttgttaccgatcatatttctttcatttacttacttgcccatggaatggggatgttttgtgagtctggtcttttacagtacgcagcacaccatcagtctggtatcaataaaagctgctctattgtagtggctggattcttgtaagcacaactttttaccaaccccctcaagggaaatattcttactgtgagggagaaaaatcagaagataaactataaagaaagactttatttgcaaatatacccatttactttaaactgtataatggttagttttctaacatgtgcattaaaaacaaaacaagaaacaactaagattcaaatttgttttttttttaactaaaattattttttaaatgaatagatgtgtttaaaaaataagcttacttattgctagactggcaaaatcccctactccatttactgaggtacttaaaaataactagcatgctgtatctctttttttcccagctttgtcttgaattggcattgccatccttgttttatctcaactggctgtagcttttagataatatcataaggattaaccagtaacctcttacattcattactgttttctaggggaaaatatttggtatttggtttttctgttgcagcaaataaaacctcaggtgtaccaggaaatcgtcctggaagtgtaatccgtgtatatggtgatgaaaacagtgataaagtgactccagggacatttataccctattgttcaatggcacatgcacagctttgcttccatgggcaccgggatgctgtgaaattctttgtggcagtcccaggtcaagtcatcagcccacaaagtagcagtagtggcacggatctgacgggtgacaaagcagggccatctgcacaggagcctggtagtcagacgcccttgaagtctatgcttgtcatcagtggaggagagggctacatcgacttccgaatgggtgatgaaggtggagaatcagaacttcttggagaggatcttccacttgaaccttctgtcaccaaagcagaaaggagtcacttgatagtgtggcaagtgatgta

SEQ ID NO: 705 - DNA, 941 bp, Homo sapiens
  misc_feature: Incyte ID No: 405149.7
gacaccatctccaaagctattaatgtcactccttttgcgagcatgattaggccccggagatttccaagtcagccttttggactgggttggggtttggggagtggatttggggatagagagaaaggtgtacttagtacacattttctaatgggcgttacgtgaactgtttgaacctgctgagtggcgctttgtagagctccatgttcacgttcagtgtcaacaccattcaacagctttgcacatcttcgtacaacataatctggctttggtgccccttgagccacctgtagaataatttatagcagggtcccacaatctactgcaatgatcgtgaacagttatcagtggatatagtgctccaagagtcaaattgtatccgttaagggttttctaacttttgctatcccccccgcgaccaaaaaaagggggggtttataatttaaagaaaaggaaaagaggcgtgggttggtagttgtgtccttaacatttaggaatgacatagcctctggagtctacaaactgaagaaactttcatctgatcagccttggaaatccaaagttaaagagcctatgtgtctcttgaggcgggggttagaggattcaaatttgggatgatgctcattgattcctgaccatagcagtgagaggccattttttgtgcaggaaatgtgcttaggactcagtcttgttttcgattatccaccacagaaaccctgagacacagagcagcttagaagtctctacccaggcgtaaatagagctccctactccagaccacctgccacccacctcccaagttgagaacacaagctccagctgggctggagagtcaggcttggtgcagggtgactttggcgaagttttgtcagatccataaagcaaactggaatttgagctttcacttaccctagtatacgttcttagaaagaaaaaaaagtcta

SEQ ID NO: 706 - DNA, 1632 bp, Homo sapiens
  misc_feature: Incyte ID No: 086533.5
tgttcttgctagaaagatgaatgcacttcacatgctggatattagagagcacaatggacagagtgcctttcaggtggcagtggctgccaatcagcatctcattgtgcaggatctggtgaacatcggggcacaggtgaacaccacagactgctggggaagaacacctctgcatgtgtgtgctgagaagggccactcccaggtgcttcaggcgattcagaagggagcagtgggaagtaatcagtttgtggatcttgaggcaactaactatgatggcctgactccccttcactgtgcagtcatagcccacaatgctgtggtccatgaactccagagaaatcaacagcctcattcacctgaagttcaggagcttttactgaagaataagagtctggttgataccattaagtgcctaattcaaatgggagcagcggtggaagcgaaggatcgcaaaagtggccgcacagccctgcatttggcagctgaagaagcaaatctggaactcattcgcctctttttggagctgcccagttgcctgtcttttgtgaatgcaaaggcttacaatggcaacactgccctccatgttgctgccagcctgcagtatcggttgacacaattagatgctgtccgcctgttgatgaggaagggagcagacccaagtactcggaacttggagaacgaacagccagtgcatttggttcccgatggccctgtgggagaacagatccgacgtatcctgaagggaaagtccattcagcagagagctccaccgtattagctccattagcttggagcctggctagcaacactcactgtcagttaggcagtcctgatgtatctgtacatagaccatttgccttatattggcaaatgtaagttgtttctatgaaacaaacatatttagttcactattatatagtgggttatattaaaagaaaagaagaaaaatatctaatttctcttggcagatttgcatatttcatacccaggtatctgggatctagacatctgaatttgatctcaatggtaacattgccttcaattaacagtagcttttgagtaggaaaggactttgatttgtggcacaaaacattattaatatagctattgacagtttcaaagcaggtaaattgtaaatgtttctttaagaaaaagcatgtgaaaggaaaaaggtaaataccagcattgaggcttcatttggccttagtccctgggagtactggcgttggacaggccttcagtccattggaactagaatgaaaaggtgtccaacatgggttagaaatttgaatctttgccaaactggaataataaattggttaatttttgtcccttaaaaaatattggaacaaaaccttgggttggttaaacaatggtcaataatttgaaaatggtaataaggtccatataaatagagaaaggacaaagtgaaattgttgctaatttaaaaaaattttacaaatcttactaaaggagtttttattgtgtaaatcactaaagtctttgtagataaaagcagaatggggaagttacggaagttgttccctttactggctgaaaagaaataattcgaaattgtaaaagaagctttttttcaagcattgaaattaaacattatttgtaggggattgcaag

SEQ ID NO: 707 - DNA, 456 bp, Homo sapiens
  misc_feature: Incyte ID No: 1095032.1
  unsure 327, 451: a, t, c, g, or other
caggagggaccggagtattgggaccggagcacacggaacatcaggcccgcgcacagactgacaagagtgaacctgcccatgccgcgccgctactaccaccagagctaggccggtgaatgaccccggcctggggcgaaggtcacgacccctcctcatcccccacggacgccccgggtcccccccgcgagtctccggctccgagatccaccccgaggctgcgggacccgccagatcctcgacccgggagaggcccaggagcctttaccagagcagtcttctcagcccaccatccccatcgtgggtatcgttgctggctggttctccttngagctgtagtcactggagctgtggttctgctgtgatgtgcaggaagaagaactcagattagagtgagtactctgaagctgcaaacagtgaccatgcgcagggttctgatgtgtctctcacggcntgtaa

SEQ ID NO: 708 - DNA, 3020 bp, Homo sapiens
  misc_feature: Incyte ID No: 337352.17
gggctcccgcctcccgccgaccggatcccaggaccttctgggcggcaaggggagctgagccccgtggaagaccagagagacgggtttggaggcagccctaagggcccttcgcgggagagcgtcgtgcacgcgggccagaggcgcacaagtgcatacaccttgatagcaccaaatataaaccggagaaatgagatacaaagaattgcggagcaggagctgggccaacctggagaagtggaaggagcagaacagagctaaaccggttcacctggtgcccagacggctaggtggaagccagtcagaaactgaagtcagacagaaacaacaactccagctgatgcaatctaaatacaagcaaaagctaaaaagagaagaatctgtaagaatcaagaaggaagctgaagaagctgaactccaaaaaatgaaggcaattcagagagagaagagcaataaactggaggagaaaaaaagacttcaagaaaaccttagaagagaagcatttagagagcatcagcaatacaaaaccgctgagttcttgagcaaactgaacacagaatcgccagacagaagtgcctgtcaaagtgctgtttgtggcccacaatcctcaacatggaaacttcctatcctgcctagggatcacagctgggccagaagctgggcttacagagattctctaaaggcagaagaaaacagaaaattgcaaaagatgaaggatgaacaacatcaaaagagtgaattactggaactgaaacggcagcagcaagagcaagaaagagccaaaatccaccagactgaacacaggagggtaaataatgcttttctggaccgactccaaggcaaaagtcaaccaggtggcctcgagcaatctggaggctgttggaatatgaatagcggtaacagctggggtatatgagaaaatattgactcctatctggccttcatcaactgacctcgaaaagcctcatgagatgctttttcttaatgtgattttgttcagcctcactgtttttaccttaatttcaactgcccacacacttgaccgtgcagtcaggagtgactggcttctccttgtcctcatttatgcatgtttggaggagctgattcctgaactcatatttaatctctactgccagggaaatgctacattatttttctaattggaagtataattagagtgatgttggtagggtagaaaaagagggagtcacttgatgctttcaggttaatcagagctatgggtgctacaggcttgtctttctaagtgacatattcttatctaattctcagatcaggttttgaaagctttgggggtctttttagattttaatccctactttctttatggtacaaatatgtacaaaagaaaaaggtcttatattcttttacacaaatttataaataaattttgaactccttctgtataaatgggtcatttttatttttaatgaaaagttattggggttttctctcttgaagggtctcattttaattcccttttccaggccgtatagatcaaatatagtactgtcattactgttggctcttgttttggtcttgacttactaatagtgttaccctgattttcagagggggacagtttatctccagaaaggccaatgtttgtatacacatcagctagacacaaatatagacatcatatgtagtttgtacatgtttcagaaacttgttttttctttgctctgtgtaacctatttcctattgctagttcagttggctttcttattcacttctgtgaccctgaaccagttctcagaccctagagtgtaagagcattgattttctacgctgtgtaatctagctcaatccctctgtcccctccgcctcaccgtcccccagccaccacattgtatagcaaaagcattacattcaatcctagaacaaaggtaaatacaacaaatcatctttgcagctggacaactaataatactttgcagcattaagagatcttctgtgttaccagtcactctgttgaaatgaactttccgaatctctttattcaggaaaacatggggttttgaaattcttgggccaagagacataactgaggggttcgcagagctaggcaagggtgcactaggaaagggccacattggtgggtggggagtaacagagaacagatggtgtcaggaagtttctctggagtaaataatgtggatattcttgggtttccctctcctccgccagctgaagctgtgttagtgctgttgacactaatataaaatgtttggtccatttgaaatccttgtcattgccttatatgggggaaactcaatcccccagcctgtgttggaaacatcaccaaactgattgtaaatgtgcggctgtagcagacattttagtgtggtggtgtgcagccatttcggccctacacctgccagcctggctaccttacagttgtgttccgatttttgcgtctatgcttggtgtgcctcacttgctgcattttccagcatgcaaccaggagttgacgtaggaaaaagggatgctttcttactttggaagctctcagggaagttggtgtcaatttctcctccactgcctggcctaccctgcactcccaaagattttgtgcagatgggtagttccattttttaaaaattgtgcagatatggaaaattgtgacttacttcatgaccagaactatctagaatatgtgtgggggtataaacatcttgcttaaccaaatatctatgtaggcagaggtaaccaggagagaagcaagacttgctgcctaaaggagcccaccattttacttttcacatttaatctgccacgttgaatcaattggaataaaacctgactcgcaggtgactggacaggaaatcccaaagttccaccatttctatgcttaattttaacgtccccccgcttttttttttggtagaaaataaaaacaagaaaatcgttccaatgtaagatgtttgttatagaaactttaggcaatacaggtgtgtaataaaatgtttaataaacttctaaacacttttgtatttggattt

SEQ ID NO: 709 - DNA, 2208 bp, Homo sapiens
  misc_feature: Incyte ID No: 241107.13
gcttcgcgcagcggcttcagcagatcggcggcatcagcggtagcaccagcactagcagcatgttgagccgggcagtgtgcggcaccagcaggcagctggctccggctttggggtatctggaacctcacatcaacgcgcagatcatgcagctgcaccacagcaagcaccacgcggcctacgtgaacaacctgaacgtcaccgaggagaagtaccaggaggcgttggccaagggagatgttacagcccagatagctcttcagcctgcactgaagttcaatggtggtggtcatatcaatcatagcattttctggacaaacctcagccctaacggtggtggagaacccaaaggggagttgctggaagccatcaaacgtgactttggttcctttgacaagtttaaggagaagctgacggctgcatctgttggtgtccaaggctcaggttggggttggcttggtttcaataaggaacggggacacttacaaattgctgcttgtccaaatcaggatccactgcaaggaacaacaggccttattccactgctggggattgatgtgtgggagcacgcttactaccttcagtataaaaatgtcaggcctgattatctaaaagctatttggaatgtaatcaactgggagaatgtaactgaaagatacatggcttgcaaaaagtaaaccacgatcgttatgctgagtatgttaagctctttatgactgtttttgtagtggtatagagtactgcagaatacagtaagctgctctattgtagcatttcttgatgttgcttagtcacttatttcataaacaacttaatgttctgaataatttcttactaaacattttgttattgggcaagtgattgaaaatagtaaatgctttgtgtgattgaatctgattggacattttcttcagagagctaaattacaattgtcatttataaaaccatcaaaaatattccatccatatactttggggacttgtagggatgcctttctagtcctattctattgcagttatagaaaatctagtcttttgccccagttacttaaaaataaaatattaacactttcccaagggaaacactcggctttctatagaaaattgcactttttgtcgagtaatcctctgcagtgatacttctggtagatgtcacccagtggtttttgttaggtcaaatgttcctgtatagtttttgcaaatagagctgtatactgtttaaatgtagcaggtgaactgaactggggtttgctcacctgcacagtaaaggcaaacttcaacagcaaaactgcaaaaaggtggtttttgcagtaggagaaaggaggatgtttatttgcagggcgccaagcaaggagaattgggcagctcatgcttgagacccaatctccatgatgacctacaagctagagtatttaaaggcagtggtaaatttcaggaaagcagaagttaaaggcaaaattgtaaatcagtcgagatcgggtgccttcagggtggtatggctgtataccaaaattgtaaatcactacatgaagcttatatattggtttggcctgaaaggtgaagtggggtaggcagggggcgggcttacaggttatggtggattcaaagactccctgatttgtgattggttaaggaagcaaagctttgtctaaaaacttggggtccgcagaaaggaacattaaggtctggccaggcccctcaggaagaaactgagagcaaagaatggaggtcagagtttagtccctggtgttcccccttatctgacgtctgtgtgaatccatttggtgggggtctgggtttctgaaaagtagctcaggggcacgtgttaaggatgtctctaggtgactctaacttccctggctattgtttgaaactgttatgaccttcttgcttatcagcttgctggtttccttctcggggcgagctgggtgcctggagttttcggtgaaggaaactcaagattctcctttatttctgtgcttgtgggaatccccctggcacaccccaaagaggggtccctgctccgtctcacagggatctttttgtatatttggcttagcatcatacatttgccatgttgtttcatcatctgcctaatttactgtttttgaatatttcatttgtttctaattgttactacagataatgctggggtgagcaactctgtgtacataggtttatctcctattggaatattttctttatataggcg

SEQ ID NO: 710 - DNA, 734 bp, Homo sapiens
  misc_feature: Incyte ID No: 400719.2
ggctcaaccccgtcccttgcttgcagtccccatcacagcccttcgcttccatcccactccctgcccttgttcaagccccagtgtccagcccagcccaacccattatctcagccttttgcctcatctctgtgtttaccaagtctctccctctagtcccccctatctctcatactctgcccctctcccagcctagactcaagtctgggtttcagctgccgccagccctattgctgctgttgctgttctctgtccttggcccaggggctggaggccttttcctgactgattactccacctgctcaccccgcaagctgagtcctttccgctcctttgccagcaccgagctcttccacttccatgttcctgaggacacattcctggctgtttggaacctcatcatcttcaaggagcaagggggaacttttggggaccactgcccagaccaaagtgtgactgtgtgagtgtctgagttaatttcccaaccccacttccaatccctgaccactttccagactaaagtgtgactttaactgacctcccgaccctgaccccaacccgcgtccagattgaagtgtgactgagtgagggccatgacctctgtcacatgaccacttccggactactgtatgactgtgcaagtgcttgagctgatctctcacctgtggcccctgacctggaaccactttgttgaatgtgtcagtatagggaatctatttgtttatcggtgaagagtg

SEQ ID NO: 711 - DNA, 1095 bp, Homo sapiens
  misc_feature: Incyte ID No: 2200534CB1
atgaaggccaactacagcgcagaggagcgctttctcctgctgggtttctccgactggccttccctgcagccggtcctcttcgcccttgtcctcctgtgctacctcctgaccttgacgggcaactcggcgctggtgctgctggcggtgcgcgacccgcgcctgcacacgcccatgtactacttcctctgccacctggccttggtagacgcgggcttcactactagcgtggtgccgccgctgctggccaacctgcgcggaccagcgctctggctgccgcgcagccactgcacggcccagctgtgcgcatcgctggctctgggttcggccgaatgcgtcctcctggcggtgatggctctggaccgcgcggccgcagtgtgccgcccgctgcgctatgcggggctcgtctccccgcgcctatgtcgcacgctggccagcgcctcctggctaagcggcctcaccaactcggttgcgcaaaccgcgctcctggctgagcggccgctgtgcgcgccccgcctgctggaccacttcatctgtgagctgccggcgttgctcaagctggcctgcggaggcgacggagacactaccgagaaccagatgttcgccgcccgcgtggtcatcctgctgctgccgtttgccgtcatcctggcctcctacggtgccgtggcccgagctgtctgttgcatgcggttcagcggaggccggaggagggcggtgggcacgtgtgggtcccacctgacagccgtctgcctgttctacggctcggccatctacacctacctgcagcccgcgcagcgctacaaccaggcacggggcaagttcgtatcgctcttctacaccgtggtcacacctgctctcaacccgctcatctacaccctcaggaataagaaagtgaagggggcagcgaggaggctgctgcggagtctggggagaggccaggctgggcagtgagtagttggggaggggagaaagtattaagccagaacccaaggatggaaataccccttagtgagtcagtttagacttcaggctgttcatttttgtatgataatctgcaagatttgtcctaaggagtccaatgggggatatgttttcctc

SEQ ID NO: 712 - DNA, 976 bp, Homo sapiens
  misc_feature: Incyte ID No: 155091.1
ccgccgtctcacaggcaaagcacggcacagcggggaagtgagaccgagaacgaagcggtgccccagtctaggctgcggggacctgtccttgctcagcttggctgtccctgtagcccagcctgcacctaggtaatgactgcacagctcaaggttgggaagccaggacctctctggcctggggccagctgcctttgcctggggtcagctgcctttgcctggggtttgaattcccgaaggagcaggcagctgagagcaggcctcccccaggaagagccttcagagccacgtgggggcatcttcccaaatgtgcaccccacctggcactcatcagatttgtgcgcttgtgatttgtttgtccttgataccacgcacaagggcaggtttttggggtggtggaaatggccagggcccatgggtctgtctccagcagttagccctgtggctgcaataaagtacagttctccctgtgttaagatcctaaccagggttaaggatcagtgtgtccgttgctagaatccagagcccacctgctgctctgaaaagcaggctcctgaggccagtgggggagcagtgccccccatgcccttcaccgaggagcctctgtgcctgtcccttgtcctcggccccaggagtctcctcaactgacactgaagtggtggaagcagttgagtgccaggtcatcccccatcaccacactggggcagcgtccccaggcttccagcagctcccaggtgggtccccacgtggaaggattaattaattctctctcaagcagttgcagccgcgcttggtggctcacgcccgtcatcccaaagtgctgacactacaggcccgagccaccatgcccagccccaacatgttattttcttatacttactttattttctgtctcccctccagacaatgtaagtgccatggaggttgagagagtttttttgctcacagttgtattcccggtgcattaaacagtgcctat

SEQ ID NO: 713 - DNA, 394 bp, Homo sapiens
  misc_feature: Incyte ID No: 189908.1
ttatgaatggaccataaccagcaaaataaccttttacacaaatagttttaaaaagtctactcacagagctaaaatcacacttaatggagaaagaatgaacgctttaccttaactagcctcaggagcgacacaagagtgtctgctctcaccacccccattcaactttgtagtggaggttctagccagcgtagttagaaaatgaaataaaaggtatccagattgtaaaggaagaagtaaaacgatctctatttgcagatgagatgatcctgtagagagaaaatcctaaggaatcacctagataactattccatttaataaatgagttcatcaagactgcaagatccaagatcagtatacaaaaatgaattatatgtgtatatgctagcaaggaaaa

SEQ ID NO: 714 - DNA, 923 bp, Homo sapiens
  misc_feature: Incyte ID No: 1259303.4
gttgactcaagtaatcttagatatttatagctagttttttctcactttctctcatttccttcactccccgaatcctaccagaaccacagtgacagcaatgcagattcaggaactatgcatgaaatcctctccttccacacatatccatcttttgggggtgggtgggtctttaaaaacaaaatgcgggctataattatttattgaccgtgttataaaacagtcttggatgcttcattcatcaatattgtcccttgaaaataatctccattctcttccaaattaaggtttggtttggttttgttttgttttaatcttctagattgtagaaggcatgaaacaaaaaatgtggagtattgaaaatattgccttcggttctggtggaggtttgctacagaagttgacaagagatctcttgaattgttccttcaagtgtagctatgttgtaactaatggccttgggattaacgtcttcaaggacccagttgctgatcccaacaaaaggtccaaaaagggccgattatctttacataggacgccagcagggaattttgttacactggaggaaggaaaaggagaccttgaggaatatggtcaggatcttctccatactgtcttcaagaatggcaaggtgacaaaaagctattcatttgatgaaataagaaaaaatgcacagctgaatattgaactggaagcagcacatcattaggctttatgactgggtgtgtgttgtgtgtatgtaatacataatgtttattgtacagatgtgtggggtttgtgttttatgatacattacagccaaattatttttggtttatggacatactgccctttcatttttcttcttttccagtgtttaggtgatctcaaattagggaatgcaattaacccatgtaaaaggatgagtgctaaagtaagctttttag

SEQ ID NO: 715 - DNA, 1987 bp, Homo sapiens
  misc_feature: Incyte ID No: 411315.8
ctacttcttcagcctcaacgtgcacacctggaacccagaaggagacctacctgcacatcatgaagaacgaggaggaggtggtgatcttgttcgcgcaggtgggcgaccgcagcatcatgcaaagccagagcctgatgctggagctgcgagagcaggaccaggtgtgggtacgcctctacaagggcgaacgtgagaacgccatcttcagcgaggagctggacacctacatcaccttcagtggctacctggtcaagcacgccaccgagccctagctggccggccacctcctttcctctcgccaccttccacccctgcgctgtgctgaccccaccgcctcttccccgatccctggactccgactccctggctttggcattcagtgagacgccctgcacacacagaaagccaaagcgatcggtgctcccagatcccgcagcctctggagagagctgacggcagatgaaatcaccagggcggggcacccgcgagaaccctctgggaccttccgcggccctctctgcacacatcctcaagtgaccccgcacggcgagacgcgggtggcggcagggcgtcccagggtgcggcaccgcggctccagtccttggaaataattaggcaaattctaaaggtctcaaaaggagcaaagtaaaccgtggaggacaaagaaaagggttgttatttttgtctttccagccagcctgctggctcccaagagagaggccttttcagttgagactctgcttaagagaagatccaaagttaaagctctggggtcaggggaggggccgggggcaggaaactacctctggcttaattcttttaagccacgtaggaactttcttgagggataggtggaccctgacatccctgtggccttgcccaagggctctgctggtctttctgagtcacagctgcgaggtgatgggggctggggccccaggcgtcagcctcccagagggacagctgagccccctgccttggctccaggttggtagaagcagccgaagggctcctgacagtggccagggacccctgggtcccccaggcctgcagatgtttctatgaggggcagagctcctggtacatccatgtgtggctctgctccacccctgtgccaccccagagccctggggggtggtctccatgcctgccaccctggcatcggctttctgtgccgcctcccacacaaatcagccccagaaggccccggggccttggcttctgttttttataaaacacctcaagcagcactgcagtctcccatctcctcgtgggctaagcatcaccgcttccacgtgtgttgtgttggttggcagcaaggctgatccagaccccttctgcccccactgccctcatccaggcctctgaccagtagcctgagaggggctttttctaggcttcagagcaggggagagctggaaggggctagaaagctcccgcttgtctgtttctcaggctcctgtgagcctcagtcctgagaccagagtcaagaggaagtacacgtcccaatcacccgtgtcaggattcactctcaggagctgggtggcaggagaggcaatagcccctgtggcaattgcaggaccagctggagcagggttgcggtgtctccacggtgctctcgccctgcccatggccaccccagactctgatctccaggaaccccatagcccctctccacctcaccccatgttgatgcccagggtcactcttgctacccgctgggcccccaaacccccgctgcctctcttccttccccccatcccccacctggttttgactaatcctgcttccctctctgggcctggctgccgggatctggggtccctaagtccctctctttaaagaacttctgcgggtcagactctgaagccgagttgctgtgggcgtgcccggaagcagagcgccacactcgctgcttaagctcccccagctctttccagaaaacattaaactcagaattgtgttttcagcaaaaaaaaaaaaaagg

SEQ ID NO: 716 - DNA, 1611 bp, Homo sapiens
  misc_feature: Incyte ID No: 345705.13
  unsure 650, 705: a, t, c, g, or other
cggctgtggagagatcctgccacgggccttgttcaccatgtcggtgctggatgcgctttgggaggatcgggatgtccgtttcgacctgtccgcgcagcaaatgaaaacaagacctggagaagtccttattgattgtttagattccattgaagacaccaaaggaaataatggagatagaggtagactcttggtaacaaatttaagaattctctggcactctttggcattatcaagagtcaatgtttctgtcggttacaattgcatattgaatattacaacaaggactgctaactctaaattacgaggccaaactgaagctctctatatactaacaaaatgtaacagtactcgttttgaatttatatttacaaatttggttcctggaagccctagactttttacttctgtgatggcagtacacagagcttatgaaacttctaaaatgtatcgtgattttaaattaagaagtgcactaattcagaacaagcaactaagactgttgccacaagaacatgtatatgataaaataaatggagtttggaatttatccagtgatcagggcaatttaggaacctttttattaccaatgtgagaattgtgtggcatgcaaatatgaatgatagttttaatgtcagtataccatatctgcnaattcgttcaataaagattagagattcaaaatttggtttagctcttgtcataganagctctcagcagagtggtggatatgttcttggctttaaaatagatcctgtggaaaaactacaagaatcagttaaggaaatcaattcacttcacaaagtctattctgccagtcccatatttggagttgattatgagatggaagaaaagccccagccgctcgaagctctgacagtcgaacaaattcaagatgatgtagaaatagactctgatggtcacacggatgcttttgtggcttattttgctgatggcaataagcaacaagatcgtgaacctgtattttcagaagaactggggcttgcaatagagaaattgaaggatggattcaccctacagggactttgggaagtaatgagttgattgaccttgagttgagatggatttctattaaagatatctctagtttaaagatactagtcacctgccataagtcatggaatagtttttatatttacagcttttatatttaaaacttgtaagagtttttttaatgattgaggaaaaagtcatttagaaaacttcagttttcggccagcgcgtcgagggaggggccagcgacacatggcctagtaaccgtccggccgcggcgctggcttaagccatggctgagggtagctggattcctcaggcccgggcgctcctacagcagtgcctgcacgcccggctgcaaattcgcccagccgatggggacgtcgcggcccagtgggtggaggtccaaagaggactggtgatctacgtgtgctttttcaagggagctgatacaagaacttcttcccaaaatggttaatacactgttaaatgtgaaattaagtgagacagaaaatggcaagcatgtctctatattggatctacctggcaacattcttattatccctcaagctacccttggaggaagactaaaaggaagaa

SEQ ID NO: 717 - DNA, 2212 bp, Homo sapiens
  misc_feature: Incyte ID No: 396796.2
gatccagtagaagttcgtctctgtttcttggctattaaatgtgtgggcctcagagccaaactatatcaagatcctagatttttcctgaactccctaggagggtcagtgctgtagcccctcctaccctggctgctccgggaagtccctgcctgccattacggtcatctgtgtgccagcaaaactgggaacctcagaaccatctggattgctggggcccacaggttggctgtgagtacctgcaattcttggctttaatttgctaataaaagtgtcacgtcagagctgagtttgaaaagttctgttgcccttccccacaacaacattctggcagccccttgctatgagccagactccgggtcgggttctggtgacagacacacctctactccagcctgggtgacaggagtgaaactctgtatcaaaaagaaataaaaaaacgaggtcaagtagtaagagaagcggtaagagtgacgggaacaggagtcattgacctcttgggagaggagacattggaggtggtgatgatttgctgaagcagccacacacgttcagcttgtgaggacagcagttgttaggcaggggatgagggaggaagctggcagatctgtgcaggtgagaggtacctgtggccttgggctcatggaagtgggaggtgatgggattctaatgtgcttgggtacagtttacaaatacaacctctcttagtttgcccaatacctccaaattcctggggtggcacacctgaggttcaggtggcatgactgagccacagtcacacattcccactgtaggataccaccacggttgggttaggttccagcacatgggcggtccccggcctggccctcttggtcccacctcacctggtgactagtgcagaccactctgttcttgcctgtttcaggcagcggaggaggagaaagagatggacctcccggactcggcctcgagggtcttctgcggccgcatcctgagcatggtgaacacagatgatgtcaacgccatcatcctggcccagaagaacatgctggaccgctttgagaagaccaatgagatgctgctcaacttcaacaacctgtccagtgcccgcctgcagcagatgagcgaacgcttcctgcaccacacgaggaccctagtagagatgaaacgggacctggacagcatcttccgccgtatcaggacgctgaaagggaaactggccaggcagcacccagaggccttcagccatatcccagaggcatccttcctggaggaagaggatgaagaccccatcccacccagcaccacgaccaccattgccacctcagaacagagcacgggctcatgtgacaccagccccgacaccgtctcgccctccctgagccccggcttcgaggacctgtcccatgtccaggctggctccccagccatcaacggccgcagccagacagatgacgaggagatgacgggcgaatagccctgctgcccggtgccttgagggggtctcagggcagcagcatacaaggtggcagcgggtaaccctgccttgttctgtcatccagggctcctttgctgccccgttctgtcacccagggctcctagggggacaaggctctctcccgaggggtgtggaattcctgggggggtctttaattctggctccttccttcctcagaacatctctattctgcaagacccctctgccatgccagggcacgcccattccagctggagtcgtggggctgggcacaggggaatttttccagagctgagcctgacgtctgctctgaagaatgcttagaaggttcccagacaccagagccagatgtcccccaccaccggtcaggacctccttgaggtgcacaagcacggtctcctctgagttcaccccagcccacccccgcacccactaattctgcttttcctgccccttgctccgtaaaagtatcaaatactttctccttggtatctcaaggaggtttctgagataggtagaagtcttgagacggaggctggccatccattcagccctgagcgtgctgagttctgtgtttctctgaatagaggtgtggaacctgaggggccagcaggcctctctgaaggcctccatggagcaaacggagccacctcgggaaagagtttaatggaatatttttgtacccgatgtttacagatgctgttgggaagttatcaataaaaagacaccattactaaaaagggaaaagtaaaaaaa

SEQ ID NO: 718 - DNA, 1270 bp, Homo sapiens
  misc_feature: Incyte ID No: 1710553CB1
caagagggcggacttccctcctcggcttctcctgcattggccgagaaaactcaccaattagggagctccgggaggcgggcttagaacgccaccgacttgaggaagcccagtacatttcaagttggtcgcggcttgggctccgctttggggaggggcagcaggtttattcactggatctctgaatacccaggccccctccaccatggccagccggggtgggggccggggtcgtggccggggccagttgaccttcaacgtggaggccgtgggcattgggaaaggggatgctttgcccccacccaccctgcagccttctccactcttccctcccttggagttccgcccagtacctttgccctcaggcgaggaaggggaatatgtcctggcactgaagcaagagctacgaggagccatgaggcagctcccctacttcatccggccagctgtccccaagagagatgtggagcgttattcagacaaatatcagatgtcaggtccgattgacaatgccatcgattggaaccctgattggcggcgtctaccccgggagctaaagatccgagtgcggaagctacagaaggaacggattacaattctgctccccaagaggccccctaagaccacagaagataaggaggaaacaatacagaaactagagaccctggagaagaaggaagaagaagtaacttcagaggaggatgaggagaaagaagaagaagaagagaaggaagaggaggaagaagaagagtatgatgaagaagaacatgaagaggaaactgattacatcatgtcatattttgacaatggagaggactttggtggtgacagtgatgacaatatggacgaggctatatactgaagaaggactctggaccctcgtgtctttctttaggatacagagagtaactgtacctattatttgtttcttcagacaagcaaatcatttggtcagagttcatataatctgtctgttccctggagatgggaatagaggatgatgacagtttattttctacacttcccctccttccacatttgtatcacctttgctatcttggggaaagtgcaaaggacaaacatctcaattgtatgaagggagaaaggagaattgaaagaagaactggggttgttagagctgagatgactgtacacatacccctgcccaatttatatagctctttgtggagataattaggggtgggagcagtttgaaggagtaagcctggttttatacttttaaataaagtgtttttatctgtcaaaaaaaaaa

SEQ ID NO: 719 - DNA, 1173 bp, Homo sapiens
  misc_feature: Incyte ID No: 230233.7
gccggaaagggaaatgaaggggcccggcgctaaccctctaaggacctgttttgcttctgtttaaaccaaatgggcagtctgtcattacacacaccctgggtcttcatatgtggccgccaggtaggagcatcacagtcaagctacgggagaaaacagtttccaggaaactggaaatgaacggcccgagtgctttccaggggctcatctgtgggaagtataatggaatgtgcttacaagggccagcaggagtgcctggtcgagacgggagccctggggccaatggcattccgggtacacctgggatcccaggtcgggatggattcaaaggagaaaagggggaatgtctgagggaaagctttgaggagtcctggacacccaactacaagcagtgttcatggagttcattgaattatggcatagatcttgggaaaattgcggagtgtacatttacaaagatgcgttcaaatagtgctctaagagttttgttcagtggctcacttcggctaaaatgcagaaatgcatgctgtcagcgtggtatttcacattcaatggagctgaatgttcaggacctcttcccattgaagctataatttatttggaccaaggaagccctgaaatgaattcaacaattaatattcatcgcacttcttctgtggaaggacttgtgaaggaatggtgctggattagtggatgtgctatctgggttggcacttgttcagattacccaaaaggagatgcttctactggatggaattcagtttctcgcatcattattgaagaactaccaaaataaatgctttaattttcatttgctacctctttttttattatgccttggaatggttcacttaaatgacattttaaataagtttatgtatacatctgaatgaaaagcaaagctaaatatgtttacagaccaaagtgtgatttcacactgtttttaaatctagcattattcatttttcttcaatcaaaagtggtttcaatattttttttagttggttagaatactttcttcatagtcacattctctcaacctataatttggaatattgttgtggtcttttgttttttctcttagtatagcatttttaaaaaaatataaaagctaccaatctttgtacaatttgtaaatgttaagaattttttttatatctgttaaataaaaattat

SEQ ID NO: 720 - DNA, 2645 bp, Homo sapiens
  misc_feature: Incyte ID No: 197362.2
ccggacgccggctgcggggcccgggtccgggcggcgcggctgcaccagcgcctgctgcaccagctgcgccgcggccccttccagcggtgccagctgctcaggctgctctgctactgcccgggcggccaggccggcggcgcacagcaaggcttcctgctgcgcgaccccctggatgaccctgacacccggcaagcgctgctcgagctgctgggcgcctgccaggaggcaccacgcccgcacttgggcgagttcgaggccgacccgcgcggccagctgtggcagcgcctctgggaggtgcaagacggcaggcggctgcaggtgggctgcgcacaggtcgtgcccgtcccggagcccccgctgcacccggtggtgccagacttgcccagttccgtggtcttcccggaccgggaagccgcccgggccgtttgggaggagtgtacctcctttattcctgaagcccgggcagtgcttgacctggtcgaccagtgcccaaaacagatccagaaaggaaagttccaggttgttgccatcgaaggactggatgccacgggtaaaaccacggtgacccagtcagtggcagattcacttaaggctgtcctcttaaagtcaccaccctcttgcattggccagtggaggaagatctttgatgatgaaccaactatcattagaagagctttttactctttgggcaattatattgtggcctccgaaatagctaaagaatctgccaaatctcctgtgattgtagacaggtactggcacagcacggccacctatgccatagccactgaggtgagtgggggtctccagcacctgcccccagcccatcaccctgtgtaccagtggccagaggacctgctcaaacctgaccttatcctgctgctcactgtgagtcctgaggagaggttgcagaggctgcagggccggggcatggagaagaccagggaagaagcagaacttgaggccaacagtgtgtttcgtcaaaaggtagaaatgtcctaccagcggatggagaatcctggctgccatgtggttgatgccagcccctccagagaaaaggtcctgcagacggtattaagcctaatccagaatagttttagtgaaccgtagttactctggccaggtgccacgtctaactagattagatgttgtttgaaacatctacatccaccatttgttatgcagtgttcccaaatttctgttctacaagcatgttgtgtggcagaaaactggagaccaggcatcttaattttacttcagccatcgtaccctcttctgactgatggacccgtcatcacaaaggtccctctcatcatgttccagtgagaggccagcgattgctttcttcctggcatagtaaacattttcttggaacatatgtttcacttaatcactaccaaatatctggaagacctgtcttactcagacagcaccaggtgtacagaagcagcagacaagatcttccagatcagcagggagaccccggagcctctgcttctcctacactggcatgctgatgagatcgtgacatgcccacattggcttcttccacatctggttgcactcgtcatgatgggctcgctgcatctccctcagtcccaaattctagagccaagtgttcctgcagaggctgtctatgtgtcctggctgcccaaggacactcctgcagagccatttttgggtaaggaacacttacaaagaaggcattgatcttgtgtctgaggctcagagcccttttgataggcttctgagtcatatataaagacattcaagccaagatgctccaactgcaaatataccaaccttctctgaattatattttgcttatttatatttcttttctttttttctaaagtatggctctgaatagaatgcacattttccattgaactggatgcatttcatttagccaatccagtaatttatttatattaatctatacataatatgtttcctcagcataggagctatgattcattaattaaaagtggagtcaaaacgctaaatgcaatgtttgttgtgtattttcattacacaaacttaatttgtcttgttaaataagtacagtggatcttggagtgggatttcttggtaaattatcttgcacttgaatgtctcatgattacatatgaaatcgctttgacatatctttagacagaaaaaagtagctgagtgagggggaaattatagagctgtgtgactttagggagtaggttgaaccaggtgattacctaaaattccttccagttcaaaggcagataaatctgtaaattattttatcctatctaccatttcttaagaagacattactccaaaataattaaatttaaggctttatcaggtctgcatatagaatcttaaattctaataaagtttcatgttaatgtcataggatttttaaaagagctataggtaatttctgtataatatgtgtatattaaaatgtaattgatttcagttgaaagtattttaaagctgataaatagcattagggttctttgcaatgtggtatctagctgtattattggttttatttactttaaacattttgaaaagcttatactggcagcctagaaaaacaaacaattaatgtatctttatgtccctggcacatgaataaactttgctgtggtttactaatctaa

SEQ ID NO: 721 - DNA, 2144 bp, Homo sapiens
  misc_feature: Incyte ID No: 978629.3
caggaaactagatactgagaaaacagttgtagctcagcgtggctacaagtaactgtggtgtggaagcagagtagagagaaaacttgttcctcattagagagagagccacacttctcactgctcacaatgagaggccaaagattacccttggacatccagattttctattgtgccagacctgacgaagagccttttgtgaagatcatcactgttgaagaggcaaagcgcaggaagagcacatgcagctactatgaagacgaggacgaagaggtgctgcctgtcctacggccccacagcgcgctcctggagaatatgcacagtcgagcagctggcccgacgccttcctgcaagggtgcaagggtatccatggagactggcctatagcacgttagagcacgggaccagcttaaagacgctctaccggaaatcggcatcactagacagtcctgtcctattggtcatcaaagatatggataatcagatttttggagcatatgcaactcatcctttcaagttcagtgaccactattatggcacaggcgaaacttttctctacacattcagccctcattttaaggtctttaagtggagtggagaaaattcatactttatcaatggagacataagttctttagaacttggtggtggagggggacgatttggtttatggctagatgctgatttataccacggacgaagcaactcttgcagcactttcaataatgatattctttccaaaaaggaagacttcatagttcaggatctggaggtgtgggcatttgattgaaattcagactgccttaaaatataacattaaaaagactgggttcgatcagccctcctaaagctggctggaaaaagaagccccagcccagcctgcctcatcccaccccaatgcttcctttctgccatcatctcagagcatgatcacattgcagaaagattctggaaggtccatgtagagggcagacattgaagaaagaaacttaaaatccaggttgttgaaaagactttgtactcccacttcctccaaatccatacagtgaggaatcagagtgtttatagatatatgagttgaatgcaatttttatttttggtaactgtgaaaaataagatactgtggatatatacatgccttgtgtatttatcagcataattttcattaccaaaatgtacagctattatttgccatggaaaaggttagtctcatttagaaaaatcgaaagtgcacagcacttaaagggaatatatgaggttttttttttttaaaaaaaaaacttttatttattatttgtagtatattgtctgaaatgtgtcggcagttttttttcttttaaatgtgtcaaatcttgaaatattaaatgtatacattttgtgctatgttttgggaacaaatctgtttgatttatatagttttatattgaattttttttgccctgattgtttagggtgataggtcttaagcagcatatatctatatatctgtatgtgggtatatagagatatatgtgtgtgtgtatgtatatgtacatatacatatatatgagtgtataattctaaatttctaaaaactcattatgaatgttcatcaatttgactattataggccagctttccatttagtcaataaaagcgtacatttttagttacttaccttgaacatattcgtgtgaaaaagaatacatcatttctcacagtcttaagttgatatttatagaaatgaatacctttgtgaacctagacttagaacaaatcctgcttttgaaaaaaaatgttttgcttcttacaaaatcatttgtgttaataacaaaaactttattttcggagtgttctttgtataacttttccaagcttttacattaacgagcaggcctctgtcttaaaagggactcagtatattaatttctgcattttttaaatcaaatgaaaaacgtcaaattggaccaattgtcttggtttcttgattcatttatttgagaaaaaaacaatacaaagaaatgcattcatatcaaaattggaatagaaaggaaaacctatttttaagatatcaacctattttcacatcataaaacatctattacataaaataaaggtccaggcatagtggctcttgcctgtacatcccagcatttgggaggccgagg

SEQ ID NO: 722 - DNA, 2877 bp, Homo sapiens
  misc_feature: Incyte ID No: 902912.6
cgactcataaatggcttaggatgtaaactcagttttattccctgggacgccctctctgctcttcagcacttgaagttcaggcagcgagagttgacatggggccagctgcgcccctggggcgggttgaagacagggtgagtctcttgatattcaggaaatcatcgcgcacccagtcaccagcgttcgggagcctgtcgcagcgggaccgacggaatccggagcaggcgacagggcgcagaagcgggatgtacttctgttggggcgccgactccagggagctgcagcgccggaggacggcgggcagccccggggctgagctactgcaggcggccagcggggagcgccactctctgctgctgctgaccaaccacagggtcctctcgtgcggagacaacagcaggggtcagctgggccgcaggggcgcgcagcgcggggagctgccagaaccaattcaggcattggaaaccctaattgttgatctcgtgagctgcgggaaggagcactccctggctgtgtgccacaaaggaagggtcttcgcatggggagctggttctgaagggcagctggggattggagaattcaaggaaataagtttcacacctaagaaaataatgactctgaatgatataaaaataatacaagtttcctgtggacactaccactccctggcattatcaaaagatagccaagtgttttcgtggggaaagaacagccatgggcagctgggcttggggaaggagttcccctcccaagccagcccgcagagggtgaggtccctggaggggatcccactggctcaggtggctgccggaggggctcacagctttgccctgtctctctgtgggacttcgtttggctggggaagtaacagtgccgggcagctggccctcagtgggcgtaatgtcccagtgcaaagcaacaagcctctctcagtcggtgcactgaagaatctaggtgtggtttatatcagctgtggtgatgcacacactgcggtgcttacccaggacgggaaagtgttcacatttggagacaatcgctctggacagctgggatacagccccactcctgagaagagaggtccacaacttgtggaaagaattgatggcctagtttcgcagatagattgtggaagttatcacaccctggcatatgtgcacaccactggtcaggtggtatcttttggtcatggaccaagtgacacaagcaagccaactcatccggaggccctgacagagaactttgacattagctgcctgatttctgctgaagacttcgtggatgttcaagtcaaacacatttttgctggaacatatgccaactttgtgacaactcatcaggatactagttccacacgtgctcccgggaaaaccctgccagaaataagccgaatttagccagtccatggcagaaaaatggatagcagtgaaaagaagaagtactgaacatgaaatggctaaaagtgaaattagaatgatattttcatctcctgcttgtctgactgcaagtttttttaaagaaaagaggaactggagaaacgacttccattgatgtggacttagaaatggcaagagataccttcaagaagttaacaaaaaaggaatggatttcttccatgataactacgtgtctcgaggatgatctgctcagagctcttccatgccattctccacaccaagaagctttatcagttttcctcctgctcccagaatgtcctgtgatgcatgattctaagaactggaagaacctggtggttccatttgcaaaggctgtgtgtgaaatgagtaaacaatctttgcaagtcctaagtaaacaaagctaactgtcgactaccagaaaatactttcaacataaatgaactctccaacttattaaacttttatatagatagaggaagacagctctttcgggataaccacctgatacctgcagaaacccccagtcctgttattttcagtgattttccatttatctttaattcgctatccaaaattaaattattgcaagctgattcacatataaagatgcagatgtcagaaaagaaagcatacatgcttatgcatgaaacaattctgcaaaaaaaggatgaatttcctccatcacccagatttatacttagagtcagacgaagtcgcctggttaaagatgctctgcgtcaattaagtcaagctgaagctactgacttctgcaaagtattagtggttgaatttattaatgaaatttgtcctgagtctggaggggttagttcagagttcttccactgtatgtttgaagagatgaccaagccagaatatggaatgttcatgtatcctgaaatgggttcctgcatgtggtttcctgccaagcctaaacctgagaagaaaagatatttcctctttggaatgctgtgtggactctccttattcaatttaaatgttgctaaccttcctttcccactggctctgtataaaaaacttctggaccaaaagccatcattggaagatttaaaagaactcagtcctcggttggggaagagtttgcaagaagttctagatgatgctgctgatgacattggagatgcgctctgcatacgcttttctatacactgggaccaaaatgatgttgacttaattccaaatgggatctccatacctgtggaccaaaccaacaagagagactatgtttctaagtatattgattacattttcaacgtctctgtaaaagcagtttatgaggaatttcagagaggattttatagagtctgtgagaaggagatacttagacatttctaccctgaagaactaatgacagcaatcattggaaatactgattatgactggaaacagtttgaacagaattcaaagtatgagcaaggataccaaaaatcacatcctactatac

SEQ ID NO: 723 - DNA, 4394 bp, Homo sapiens
  misc_feature: Incyte ID No: 978990.1
  unsure 3069, 3076, 3078, 3080, 3082, 3084: a, t, c, g, or other
gggaggctccgttgcctgctcccggagggagacgcgctgccgaggagaacccagcgggagaacatttcaggataggaataggccaagtgctgagaagatgagtcttaggattgatgtggatacaaactttcctgagtgtgttgtagatgcaggaaaagtcacccttgggactcagcagaggcaggagatggaccctcgcctgcgggagaaacagaatgaaatcatcctgcgagcagtatgtgctctgctgaattctggtgggggcataatcaaggctgagattgagaacaaaggctacaattatgaacgtcatggagtaggattggatgtgcctccaattttcagaagccatttagataagatgcagaaggaaaaccactttttgatttttgtgaaatcatggaacacagaggctggtgtgccacttgctaccttatgctccaatttgtaccacagagagagaacatccaccgatgtcatggattctcaggaagctctggcattcctcaaatgcaggactcagactccaacgaatattaatgtttccaattcattaggtccacaggcagctcagggtagtgtacaatatgaaggtaacataaatgtgtcagctgctgctttatttgatagaaagcggcttcagtatctggaaaaactcaaccttcctgagtccacacatgttgaatttgtaatgttctcgacagacgtgtcacactgtgttaaagacagacttccgaagtgtgtttctgcatttgcaaatactgaaggaggatatgtattttttggtgtgcatgatgagacttgtcaagtgattggatgtgaaaaagagaaaatagaccttacgagcttgagggcttctattgatggctgtattaagaagctacctgtccatcatttctgcacacagaggcctgagataaaatatgtccttaacttccttgaagtgcatgataagggggccctccgtggatatgtctgtgcaatcaaggtggagaaattctgctgtgcggtgtttgccaaagtgcctagttcctggcaggtgaaggacaaccgtgtgagacaattgcccacaagagaatggactgcttggatgatggaagctgacccagacctttccaggtgtcctgagatggttctccagttgagtttgtcatctgccacgccccgcagcaagcctgtgtgcattcataagaattcggaatgtctgaaagagcagcagaaacgctactttccagtattttcagacagagtggtatatactccagaaagcctctacaaggaactcttctcacaacataaaggactcagagacttaataaatacagaaatgcgccctttctctcaaggaatattgattttttctcaaagctgggctgtggatttaggtctgcaagagaagcagggagtcatctgtgatgctcttctaatttcccagaacaacacccctattctctacaccatcttcagcaagtgggatgcggggtgcaagggctattctatgatagttgcctattctttgaagcagaagctggtgaacaaaggcggctacactgggaggttatgcatcacccccttggtctgtgtgctgaattctgatagaaaagcacagagcgtttacagttcgtatttacaaatttaccctgaatcctataacttcatgaccccccagcacatggaagccctgttacagtccctcgtgatagtcttgcttgggttcaaatccttcttaagtgaagagctgggctctgaggttttgaacctactgacaaataaacagtatgagttgctttcaaagaaccttcgcaagaccagagagttgtttgttcatggcttacctggatcagggaagactatcttggctcttaggatcatggagaagatcaggaatgtgtttcactgtgaaccggctaacattctctacatctgtgaaaaccagcccctgaagaagttggtgagtttcagcaagaaaaacatctgccagccagtgacccggaaaaccttcatgaaaaacaactttgaacacatccagcacattatcattgatgacgctcagaatttccgtactgaagatggggactggtatgggaaagcaaagttcatcactcagacagcaagggatggcccaggagttctctggatctttctggactactttcagacctatcacttgagttgcagtggcctcccccctccctcagaccagtatccaagagaagagatcaacagagtggtccgcaatgcaggtccaatagctaattacctacaacaagtaatgcaggaagcccgacaaaatcctccacctaacctcccccctgggtccctggtgatgctctatgaacctaaatgggctcaagggtgtcccaggcaacttagagattattgaagacttgaacttggaggagatactgatctatgtagcgaataaatgccgttttctcttgcggaatggttattctctgaaggatattgctgtgcttttcaccaaagcaagtgaagtggaaaaatataaagacaggcttctaacagcaatgaggaagagaaaactgtctcagctccatgaggagtctgatctgttactacagatcggtgatgcgtcggatgttctaaccgatcacattgtgttggacagtgtctgtcgattttcaggcctggaaagaaatatcgtgtttggaatcaatccaggagtagccccaccggctggggcctacaatcttctgctctgtttggcttctagggcaaaaagacatctgtatattctgaaggcttctgtgtgacaggaaacccaagcctaagaaacaattaagtggttctcatctctaattaactgtgaaaccatttaatccaaacatgtaagcacacactcacttattaagtcacatacttttctaggtgctggggattgagaacgaatcgatgtaagattcctcctttagggcagagacagaccactgacaaatacacagatagacaaggaatttcccatggtaaaaagggatatcagtaattagaggaccgtgagactcagagatgtgtgtgtgtgtgtgtgtgtgtgtgtgtgtgtgtgtgtgntgtccgngngngngnacgtgcacatgtgtgtaggtagatggagggggtgattattttgggtggtcagggaagtgctcagtgagggaagaacttgtcatgagaatctctgagcgtgccaggcagactcggatatttttataaatttttaacatggccacttgcagaagagcttgaatgggacgtgcagcgagaatgtgaaggatggagcaggtagctcatctggccttgtaggtgccgggaacgggcaagacatgttttgaaatgtaagatcacagactgttttttgcaagaccacattatattactttattattttctgctttttcttttaacgacattagtgtttttgatcactatattttaaaatgctttttgtgagccttttggttatgtggaatctgttccttagctctgattttttattcttatggagcgtcttaggttactacatgaaggtaagactgccacagtcccccagggaggcacactgtgttttactgattgatttgaagatgatagagagcctagggggatgagtctattggactcaaaggttacattttgtttttccatttaatttaataatcaacaaaacgacaaagtcagtttaatatctttcttctgctgagtcttcaggatgttagctagtctttcaaaagccattgctacaaaagtgcaaatttctcatttcctgtgggtctctagaaactctctcaatatttaaagccaaacaaatccatcttttctgagagacagaaactaaaaaattcagagttaattcactattaaaaacagcaaggccctgctatttcccaagaataaagaaatttaaaattctcattgtaagaagtatgaacttgaagctagaattggtttatttctggcagctacttacaatattaagaactttactttttaaatttgagacaatttcacaggaaagcaagaaattagtctattgtgaaatgtttttacaactaacttggaatatactgcaaatcactagtaagtagagacacatttaagataaaatgattaataaaacaattggtaattctgaataaggatctgaataaatccagatcacagactgttcctttaccaatatgtaaaagaatgtgcaaaattcgtaaaaatatacccaaaaatttaccagcaacagagaagcaaagaatggagttcaaccttacactataaacatctaatagatatgtatgaaaatttaaaaactagaaaaggttgggcatggtggctcatgcttgtgatctccaggactttaggaggccataggtgggacgattgtttgagctccaggagttcaagaa

SEQ ID NO: 724 - DNA, 791 bp, Homo sapiens
  misc_feature: Incyte ID No: 444850.11
atgagaatgagaatgaggattcagctgactttgtgagcttcttcccagattttgtgtggacactgagagatttctccctggacttggaagcagatggacaacccctcacaccagatgagtacctggagtattccctgaagctaacgcaaggtaccagtcaaaaagataaaaattttaatctgccccgactctgtatccggaagttcttcccaaagaaaaaatgttttgtcttcgatctgcccattcaccgcaggaagcttgcccagcttgagaaactacaagatgaagagctggaccctgaatttgtgcaacaagtagcagacttctgttcctacatctttagcaattccaaaactaaaactctttcaggaggcatcaaggtcaatgggcctcgctgaagagattctgcagacatacttgaaatccaaggagtctatgaccgatgcaattctacagacagaccagattctcacagaaaaggaaaaggagattgaagtggaatgtgtaaaagctgaatctgcacaggcttcagcaaaaatggtggaggaaatgcaaataaagtatcagcagatgatggaagagaaagagaagagttatcaagaacatgtgaaacaattgactgagaagatggagagggagagggcccagttgctggaagagcaagagaagaccctcactagtaaacttcaggtatccaaatgcatcaccttgtggttcgtttttctttttctctctgttcttcctgatcacaaacttagtatggcagagcgaacataaagcccaggggaagg

SEQ ID NO: 725 - DNA, 503 bp, Homo sapiens
  misc_feature: Incyte ID No: 1099640.1
attttacaactgaacctgaatctatttgaatccaagtttgtggaagccaacaactatcatctttagatccatcatgaccatagcaaccaccaactgattatttggataattcagacaaacatgcatcttgggtcctgatggtccttatcactgctttgattcccttctctttggagaactagttgtactgttataataaacatgtaactgttgttattaaatgctatctttttgtactagacattaattgcatccattttgttattttccaggaagagaaaacaaccaagattattttctcctgagcttctcgtgctctaatttgcatcctccttaataatacctgccattggaatgataattactttgcaagaaaagcccacatgaaggggtcatatagtcttgtagaagcacagaaatccaaagtgtagctaatgcttgatatgttccactgggagaccctaatttatctgtggcaaatcccttgatactggctccatcca

SEQ ID NO: 726 - DNA, 992 bp, Homo sapiens
  misc_feature: Incyte ID No: 414363.1
  unsure 475: a, t, c, g, or other
gtgttagatgaagtagcaaatgctaaacacaagaaaaagggtaagctaaaacctgaacaattgacttgtatgccatatccttttgatcagttccatgacagccatcgctacatagaacattatactctacaacctgaaacaggagcactcaatctcattgatccaatacatgagttcaaagctctcacaaacacagaaacagccacggaagtggacattaagatgaaattcagcaatgaagtcttccgatttgcatcagcttgtatgaattcacgcaccaatggcaccatccattttggagtcaaggacaaaccccatggagaaattgttggtgtgaaaatcaccagtaaggctgccttcattgaccacttcaatgtaatgatcaaaaagtattttgaagaaagtgagatcaatgaagccaagaagtgtattcgggagccaaggtttgtggaagtccttctgcagaacaataccnccatctgaccagatttgtcattgaagttgatactattccaaaacactctatatgtaatgataagtatttctacattcagatgcaaatttgtaaagataaaatatggaaacaaaaccaaaatctttcactgtttgtaagagaaggggctagctctagggatatcctggccaattccaagcaacgggatgtagatttcaaggcatttttacaaaatttaaagtcactggtagcatctagaaaagaggctgaagaagagtatggaatgaaggcaatgaagaaggagagtgaaggactaaagctggttaaacttctcataggaaaccgagactcactggataattcatactatgactggtacattcttgtaacaaataaatgccatccaaaccaaataaagcacttagattttttaaaagaaattaaatggtttgctgtgttggagtttgatcctgaatctatgatcaatggagtggtcaaagcttacaaagaaagtcgggtggcaaaccttcactttcca

SEQ ID NO: 727 - DNA, 2064 bp, Homo sapiens
  misc_feature: Incyte ID No: 1382987.2
cacaaacctcgggacggctttcatctggtcaagtatgtgggtcaggattctatttcctaagtactcaaactttggggtgttgggctgtttttattccagctgataaagtgatactcaagatagtactaattactccagtacatgtgggcctgtgtcatattgaatagcaatgccaaagtcccagcagtcacacagcagggaggcatctgatctgttgttggatccctgggccctgaaatgcaaagcaggctaccctttaacagctgttaatatgaatacaggtgtcttccttttgggccttgggtgcaccttctgtagaaatatgcatgacataaacagatgatctaattcacgaggacatctatgtctgcaggaccaaaacctgggcatccgtctgtctcagcagatgccatctcacttgccagcaatcttagctttctccattttttattttttgagaaaaatgaaggagacagacatagtcttatgaaataccagacttcagaatccaggtacaaatccgatcccacaatcccatgctgagatgaatgtggttctaaatgctcctttcagagagtgagtgggacctgcgtgggggcctcacattctgactgttccctgcagtcacagcttaaaatactttcatgttatctccagaaactgtcacagtgtcctccatcctctaatagttttgccactgagagcatcggccacactgcatctcctctctgccggactttagatcccggtttttcctttggggagatgagaacaatatggacacccatgggatgccgactgtcctcccaaactctagctgttcttagcccaaccgctcctctcctgacaaagacttcagtggaaaagacgggtccaggcctgcgtcttaacaccctgcccggggatcagcatcaataccacacagcgcagccacctgacgctgagaatgcggtcgggtctggtccaccggaaaggcgagtctatcatgagagagactcttaggaacatggtccaggctttgtggaacagcaagtactcttcacataactctcttctcagccgtaagcctcactccaagtgctgagaaagtgcagcgtgccaaagcggccagcctcagcctctgtcttgtgttctctcgttctttccagagacaaggcagacagaacgcagaccggccacgtgctgggcaacccgcagcggagagacgtggtgacatgtgaccgagggctgcccccagtggtcttcctccttatccggctactcactcacttggctctgcttctgggagcgtcccagagttcccaggctctgataaacatcattaagcctccagtgagggatccaaaaggctttctgcagcagcacatcctgaaggacctggagcagttggccaagatgctgggacacagtgccgacgagaccatcggcgtggtccacctcgtcctgcgcaggcttctccaagagcagcaccagctctctagcagaagtgaggaaaggggcaagggctgggcggggatcacacagcacaacggcagcgcaagcaggctcgctgtcttgtgggccaccccacacacagccagtctgagctctgtctgtgctgttgctggaaagaatgagagaacacacagagagaaaaccgtgtctagggaaggcgatgcctggggctggaaaaaggaagcactctgcttgcccagaggctggaaggagctgctctgttccctccattcacccctgcctggctaagacctgcggtattcgggagcgtctgcacgcaagtgttcagtgtgcatatatggggagtcttcagttccgaagtcagccccgtaggtcattcccctaccatgctgggagcacgtgtcgtccacacagagcgtgcgtgtcaaaggatcaatcaccatcacagttgtgtgctgatttattaaatgtttatatgtccacagttatgttaaaaaaaaaaaagctataaaatattgtattcactgagctaactttctattttaaaaatttaaatccatacagaaagaaaaggtctgtaagacaacttagtaaaatggttatatggtt

SEQ ID NO: 728 - DNA, 910 bp, Homo sapiens
  misc_feature: Incyte ID No: 222304.1
tcttacaataacatgaaagtgaagtgtctaaagcagggagatctggaattccactagcctggttcggctcttttcatttttctgagctcctttgcagcacctggctgggcgccgacgtagttttacagcattgagactgtagcctggatcactttgaaatctttttctttttccttttcatacaatatcaggaaattttcagtgatacagttgtcatgaatgtcgccctgcaaatgccctaatgatccctctgtggacagaccaaagttgacccgttggctcttgcagattcatttttgttttttgtttttgtctttgtctcacttgaatgatttcattaggattactcctgagaagtaggattgctgggccaaagggcacacagacttccccctttcttaaggaattttgctaacttgctttgcaaaagagcccctgactctgcatggccccccggggcagccgcgggttcctttccccacagccgtgccagtgccagccttgagtctgcgtgaccttgagccgcagggaagcggatgagtggccagcagccctctgctcctgcctcctcactgtgtgcacgcctttctgcaaatgccgctgcccgctgccgtgcgctccgcttccagacagtaattgttacaagacctctaactgcctcgacgaccacatggcccttaaaaatggtcatttcccccgtgagcattttctcttcatcgaaaccactttgtttatacttgctggtgacagtgtgactgtggacttgcctccagtttggttttctccctagttattaaaaaaaaaaaaaatggtgccaaccttggcagccaaggctgaagcaagggggtggtgggcatgaagcgatgaccccacggaggatgtccagggacaggtgcagctggtggctgca

SEQ ID NO: 729 - DNA, 526 bp, Homo sapiens
  misc_feature: Incyte ID No: 273277.3
  unsure 477: a, t, c, g, or other
tccaggcatattcccttcccggggactgtgtatgtatgtgctgtttcttctgtttggatattcttcctactcctcctttgcctactggcctcattcccatcactcttttttcagtttgcatgtcagcctgttctcccagcattatatttacctgaaaccgtcttactcttttatgtgtttattgtctgtctctcattagaatgtcagctcatggagattaaatagttcattttattcgctgctgaacccctcccagcacctgccacaagtgggcaccaactgactgatgaatatagcatataaaatgtgaagtcggtttgtactgatttgttttactatgtttttaagcttaaaattcttctgtaccttttagacctactattgtacacagattcttaattaaagcaacaatagaagaaagaatgcaggcaatgctgaaaactgctgagagaaggtaggtaataatttaccacaagncagaagggggaaggttttcctgttaaaagtttgtatctttagaacttct

SEQ ID NO: 730 - DNA, 742 bp, Homo sapiens
  misc_feature: Incyte ID No: 347049.8
taataaagacttacttaaccaatattattgattaccagacttttatgaaagccaaagactgcttgctagtaggaaaaaatttcaaataataaccaaagctgaaaaatggtctgtcataaattatttccccggtaatttttgaaaggaaaaatgtataacaagtactatttacatatctgcatttaaaaaagcaattcttagaatacttcctttacattattctcctattttagacattttgtgaaagagaacaaattgtccagtggcctcctgtcagatcaacaattattatactccttaattccatgcaaatttaaatgaatgctataaaattttaaatctgtagcctgggtgtacgtttcactcaagttctcctactgaggactcttgactaacagcatactggcagtttcaccttaacctgctcgttaaataatgtgttggtgtgagatatcaggaatgtctcatgatatcacgtttaccatttacaccatctgcaaccatatgctattaataaaatggaaaaaaacaaaatggtcattttgcatatacttcactctgacctagtttagtccatgatactataattgtgagagcatatccagatgctgtgttctctatgtaaaacagtattgtccattcagaaatgtgtgacccttcatttatggatattgactatatgtaatgcagtgctatcccaatattttcaataaaggactttatgcattcagtgaaaaaaaaa

SEQ ID NO: 731 - DNA, 924 bp, Homo sapiens
  misc_feature: Incyte ID No: 337352.2
tggagactcaccaatctatctccctacatcaaggtcctcttagaagtcacctttctgctgtataatacagcgtaaccctacttgagacatttccatttaaattgctctgttccacatgtttcatcctgtccttgctgtaactgtgtaggtgggtgacaacattttcgaactgtatatttgtcacctctgttagtctatctctaagaacacagccaataagacatcacttgacaagccattaccttattgaccaagactattttgtgaatcaaatgcaatgtgacttgaaaatcaaatcgtttcaatggtcatttaagttgttaattttaaaaaatggtcatttcagcttgatgcataagagcgttctttgcaggaacttcatttttgactacaaaggctttgaattttattttgctgcttgcagtaattttgttttctttttcttccagggtatatgagaaaatattgactcctatctggccttcatcaactgacctcgaaaagcctcatgagatgctttttcttaatgtgattttgttcagcctcactgtttttaccttaatttcaactgcccacacacttgaccgtgcagtcaggagtgactggcttctccttgtcctcatttatgcatgtttggaggagctgattcctgaactcatatttaaactctactgccagggaaatgctacattatttttctaattggaagtataattagagtgatgttggtagggtagaaaaagagggagtcacttgatgctttcaggttaatcagagctatgggtgctacaggcttgtctttctaagtgacatattcttatctaattctcagatcaggttttgaaagctttgggggtctttttagattttaatccctactttctttatggtacaaatatgtacaaaagaaaaaggtcttatatt

SEQ ID NO: 732 - DNA, 399 bp, Homo sapiens
  misc_feature: Incyte ID No: 023151.1
atttcttcccacatcactcctattcctcctctttttctcacttaatactccaaaactctgtttatttacttgaaaagtggcaataatattggtgtcctcatcataaagttattaaaataaacacacgagatacatgtaaattgtcttgcaaataatgtctataataatataatttttaaagccaagtatataatacctcataagctgcttaaaatatttttatttgatgatgctattgtttttaatagggccagcaaattaaaaaaacctttttagggcaggcaggtaatttaaattttttagaaccagtcaggtataaagcaagaggggacaaaggaggactggagagtggatgcccaatgatataaaagcattcacgttccaacaattaaaaactat

SEQ ID NO: 733 - DNA, 2302 bp, Homo sapiens
  misc_feature: Incyte ID No: 338158.4
gttaaatgcagctccagggttgcgaggcacccaccagcatcattccccatgcgaggtggcaaatgcaacatgctctccagtttggggtgtctacttctctgtggaagtattacactagccctgggaaatgcacagaaattgccaaaaggtaaaaggccaaacctcaaagtccacatcaataccacaagtgactccatcctcttgaagttcttgcgtccaagtccaaatgtaaagcttgaaggtcttctcctgggatatggcagcaatgtatcaccaaaccagtacttccctcttcccgctgaagggaaattcacagaagctatagttgatgcagagccgaaatatctgatagttgtgcgacctgctccacctccaagtcaaaagaagtcatgttcaggtaaaactcgttctcgcaaacctctgcagctggtggttggcactctgacaccgagctcggtcttcctgtcctggggtttcctcatcaacccacaccatgactggacattgccaagtcactgtcccaatgacagattttatacaattcgctatcgagaaaaggataaagaaaagaagtggatttttcaaatctgtccagccactgaaacaattgtggaaaacctaaagcccaacacagtttatgaatttggagtgaaagacaatgtggaaggtggaatttggagtaagattttcaatcacaagactgttgttggaagtaaaaaagtaaatgggaaaatccaaagtacctatgaccaagaccacacagtgccagcatatgtcccaaggaaactaatcccaataacaatcatcaagcaagtgattcagaatgttactcacaaggattcagctaaatccccagaaaaagctccactgggaggagtgatactagtccaccttattattccaggtcttaatgaaactactgtaaaacttcctgcatccctaatgtttgagatttcagatgcactcaagacacaattagctaagaatgaaaccttggcattacctgccgaatctaaaacaccagaggttgaaaaaatctcagcacgacccacaacagtgactcctgaaacagttccaagaagcactaaacccactacgtctagtgcattagatgtttcagaaacaacactggttctcagcaaaaggaccccggaaacattgcaaactattctaatacctcagtttgaattgccactgagcactctagctccaaaaagccttccagaatttcctgaggcaaaaacacccttcccttttgagaaacctaggggcacattggcttcaagtgaaaagccatggattgtgcctacagctaaaatatctgaagattccaaagttctgcagcctcaaactgcaacttatgatgttttctcaagccctacaacatcagatgagcctgagatatcagattcctacacagcaacaagtgatcgtattctggattctatcccacctaaaacttctagaactcttgaacagccaagggcaacactggctccaagtgaaacaccatttgttcctcaaaaactggaaatctttaccagtccagaaatgcagcctacgacacctgctccccagcaaactacatctatcccttctacacctaaacgacgcccccggcccaaaccgccaagaaccaaacctgaaagaaccacaagtgccggaacaattacacctaaaatttctaaaagccctgaacctacatggacaacaccggctcccggtaaaacacaatttatttctctgaaacctaaaatccctctcagcccagaagtgacacacaccaaacctggtaattaccctaaacttttttgaatattccaaaagtggggttgaaaacaagttctttgcaattatttggagcaagaatttctgatttatattttgacatttgttacatttttccatgaaaagtgtaagcatgcaatgaaatgatctaatcataaatagccactgtgatatcacagcattgctctcagcaatgttcatgatcatcacagagaaaacacagaaatgtaatgatatgaatgattgcgaactcccttgtctactactgcaaaatagtttccaataccagtgttgactggaattctaatctcatgaacaatagcctttcagctggaaaggggagaagtgtttctatcttctaagaactctgcattattttagagtttctcagttctcaggctagaagaccagaaagacctgtattttcccaatgctccaagacttctaaattggggctgatttctgaacattgacctctgtttacctcttaggaattttagtggtgtttcctttc

SEQ ID NO: 734 - DNA, 437 bp, Homo sapiens
  misc_feature: Incyte ID No: 212934.1
  unsure 434: a, t, c, g, or other
gcacttttaaacttcgtcagacctgcattaacctattgtcaacctactttagtaaaggaggctttgacaataattttcttcaatgacatacagtattttatagttagtcataagctttcaccactagctttgacaatgatatactgcgatctttggtcttctggaataagttatctacaataaagaagtccttaatgacatcaacatccctactgtgactaagcagaagcatgcttttatttccttgctactgcagaaatactaagatcaatatatttaaggtaaagcaaaaaaaaagaaaaaaaacacgcaaaaatcccataacaaaatatagatgaaaaattgtggctctgtgggtggcatcctttgcttgtatgtaccaagttcttccggggatagactataaaattggtttcagacagtgtttgagaganaaa

SEQ ID NO: 735 - DNA, 286 bp, Homo sapiens
  misc_feature: Incyte ID No: 428130.1
gtggcggaggaggtagaggtggtgaaggctgtgaagcagtgtagggggtgactatcttaggttgcggggataaagggggcacaagtgaagtgtagggccgattcatagactccattctggccttgctggactcttccaactgagtgcctcgtttccaggcttcagagaatacggagctcacaatgctctggtaacggacgtgtcctgctggctgggtgtcagaaactccgctatcagactgattggagtggtttgactgagactctgggatgctgggaagaactgg

SEQ ID NO: 736 - DNA, 2580 bp, Homo sapiens
  misc_feature: Incyte ID No: 399074.5
cattactgtggacgtctaggatgtctgtttgcacgggctggcctcagatgagaagtcagttggaggagtctggctgtcgtcagtgtgtgggtttttgcttttcccttcctcccttcctctgccccatttactccatatctgtaccagtcgtgatcagccttctaggctagtgtctaggtctccagggttttgatggtcttaggtaggctcttgttccttctgtccctcttagactggcatcagtactatgacatagtttatatgaagcctcatgggagactccagaaagtcatgaaccacatcacagacgggccgaggaaggacctggtgaaggggaagcagattgccgctgcgctcatgctggacagcaccttcagcatcctgcagacctgggacaccatcaacctgaacagcttcttcacccagttcgagcagttttgctttgtcctgcaacagcctatgatttatgaaggacaggcacagctgtggaccgatttgcagtacagggagaaagaggtgaagagatacctgtggcaacatctgaaaaaacacgtggtaccattgccggacggaaaaagcacggactttttgcctgtggactgcccagtgaggagtaaactgaaaacaggcctgattgtcctttttgtagtggaaaaaattgagcttttattagaaggcagcctggactggttgtgtcacctcctaacctcagatgccagctcaccagatgagtttcaccgtgacctaagccacatccttgggatacctcagagctggcggctgtacctggtgaacctgtgccaaagatgcatggacacaaggacgtacacctggctgggcgccctgcctgtcctgcactgctgtatggagctggccccgcggcacaaggatgcctggagacagcctgaggacacctgggccgctctggagggatctccttctcactgttccgggaacaaatgctagatacgagttccctacttcagtttatgagagagaagcagcatttgctgagcatagacgagcctctcttccggtcctggtttagtctgctacctctgagtcacctggttatgtatatggaaaacttcattgagcacctgggtcgttttcctgctcatatcctggactgtctttcagggatttactaccggcttccgggacttgagcaagtcttgaatacgcaggatgttcaggatgttcagaacgttcagaacattttagaaatgctgttgcgactcctggacacttaccgggacaagattcccgaggaggccttgtcaccatcctacctgactgtgtgtctgaaactgcatgaagccatctgcagcagcacaaagctacttaagttttacgagctgccagccttatctgccgagattgtctgcagaatgattagacttctatctctggtggattctgcaggacagagagatgaaactggaaataattcagtccaaacagtcttccaagggacccttgctgctacgaaaaggtggctccgagaagtttttacaaagaacatgctcacatcttcaggtgcctcattcacatacgtcaaggaaattgaggtctggaggcggctggtggaaatccaattccccgcggagcatggctggaaggagtcgttgcttggagacatggaatggaggctcacaaaggaggaacccctctcccagatcactgcctactgcaatagttgctgggacaccaaaggcttagaggacagtgtggccaagaccttcgagaaatgcatcattgaagccgtgagctcagcctgccaggtgaacaatctctcctcctgggaaacggattcgggctcacagctgtgttctgccatgacccagctaagggctatgaagcacccgctgggtctcagctcctccgctaactcagagattgggaagtgggcacctcctccctcgccaagggcaatggcgctgaaatctagttctctccggattcctcagtgtgctgcacagtccctgctgctcgcaccatcctgcatgtgttccatatggaatcacggccgtgcgcgtgtggcacaagtcacacgggcttgcaggccgttcctcagatggccctgtcatcactgtggctgctggtttgattgattgttaacacttgctcagtaggtgtacgggaagagactccaaaggttgacagaacatttatggaagcaaaatatgtgaaatggaaaattgtatcaatttatttagctcttttcggcaaaggggaagagattgtgcccccctgtctcccaggaacagtctcgcaggcaatgccacatgaggaagctccctgctggccatggctgccctgctcacatttcctaattggacacttaacccctgtacaagcacagccttgcggccacaggggaagtccagaaacattgaggtcattgaattccggggaccaaggggttctaattttttaagtgactgatacctttgataaggttttcctttccctttttcgttaactctttgttgagatattgttcgtatgccatacggtacatctgtcaaaagttccagttcagcaggttttggggtagtcacagatatgtacagtcat

SEQ ID NO: 737 - DNA, 1024 bp, Homo sapiens
  misc_feature: Incyte ID No: 221172.2
  unsure 84, 923: a, t, c, g, or other
ctgggaagctggaggcagcggggcagccccggcgcgtgacctgggcgcttacctaagttcgagttcccggcacgggcgcggganggcggggcctggagggggcgttcccagctttgccagtgccacgaggagccggttcgcccgccccgcctgggaccttccgtcctacccagtcctggccggttttctgggtcctcctgaagtcacgccacccggctagggggcgaggagcctcctactgcccatcttcccgtccaccacgcgcagttactcacctttgtctccggcctggattaaggatccagcctttcgcctccatccctcttgtccctcctgatcctcctgaccctgtctttaagatcccaggagctgcggtgaggagtgaggctgaggggcccctttcatctgatgcagcgactccgctttcctccggcggctctgtctatggctgagctctttgatcctttgagagatggtttgacttttcccgagcaaagagcctgcgttgaaaagcgggggtggaattcagtcctcacagataatgaggggacaagacctaattgaaccgagtattgccgggaaggaaaaggcaacgggccaagcctttgacagggtgcgaaactgacttttatcatcgttatagtctttaaatcctgggaaacgagttggcaaccccaaaataaagaagtgtaatgacgtctgatgacttcacccaaatacagaccattccaagaaagacttgcgcagttctcatgcgtggttgcgtttttgcataaaactaagattccctttgtccgcatgtttaatagcttaaaaataaattgaggtttttatcggataaaagtagccaggaaaaagtgatacagtgaaaacgattacaggatatttatagacttgtctttcaagttattagaagtctcatnctatctgggggcagtgatggtggtggtggtagtggaacttgtgaattgagattcatagtggaacttgtgaattgagattcatctcgaaactggaggcatgg

SEQ ID NO: 738 - DNA, 549 bp, Homo sapiens
  misc_feature: Incyte ID No: 113452.1
ctgggacatcttcatcctttttgtccccatgaccttccttatttatgctaatacatttgccttccctgagttcctctacactacctatctctcaaatggcagcagggtcaacatcaccatagtctgctattctttgataactccatttatgctgtctttgaagttcacttctggcattatcacttttcatttctttgctgcatttttatctttgttggccagttccctcttttcgtgatacattgttgtaaaatctcatgggagttagccacctggagacagggaggcaacagaactacacactttgctgtctgtgcataaattgaagagcagaagctcagtgaccaatcactgatggactttgaaaggagtgacagtaattggccctcaattatgatgcttatcttttatttatgtcgtgatttctagactgaagagttagcaaccaaagtttataccatatgcaactactcgtgatcaatataccaaggtactgaaaaagaaccatgtcactgggctactagtgttatttaactgaatcatgcagag

SEQ ID NO: 739 - DNA, 385 bp, Homo sapiens
  misc_feature: Incyte ID No: 029942.1
ctttaactgcaaactttttattcagcttgttaatgacaagattttttaaaagttaacagctcattaagatcatatagtaacctaataagtttttctactggtttttattcatacaggcacttttagccaaagatttgaatgttggaaatattcgactttatttttcagagttcatgagtcattcacaaacatttattaaataccttctatttgccaggtatgttctaggccctgaggacatgtgtgaataaaatagagaagaattcctgccttcggaggttatagtctggagggaaagaaagatgggaaataaataagtaaaatacagtgtgtgtgtatatatgtgtgtatatatataaaatacagataatgttaagcgttaagg

SEQ ID NO: 740 - DNA, 1550 bp, Homo sapiens
  misc_feature: Incyte ID No: 1382987.10
atcctaaaagcagacatttagaaatatagttatctctggggagggacggagggatgtgaagttgtaactatatgcataatgttttgtttctctaaaaaatgatctatcgcagcagcttgggaggctgcaaagaaaattttaaaaaatttaaaaattttaaaaaatgatctaaagcaaatattccataaatgctgagatttcttaaagcttggtggggggtatacagatggtcattattattacttaaagtttgaaatatcttagtgagagcggaggagaccttaaacagaaaaagaagagggaaaatcgtaacttgagaatgtagtcccctgacaagcagcataatcacaaaacgagcattcagagttcaagcgttaaacacaggatcacaaaggcctcgcaccccacaccccacacacacggcgcagccttggccctgaatgtggtgctccctctgtcgcccggcctggccgccctcagcctcccccctgctaatgactcctgtccctgcctttcttcagtgtcttcgagagaactctgacgtgaagacgcacgggccttttgaggccgtgatgcgcactctctgtgaatgcaaggagacagccagcaagaccctcagcaggtttgggattcagccgtgctccatctgcctgggagatgcaaaggaccccgtctgtctgccctgcgaccacgtgcactgcctgcgctgcctcagggcctggtttgcctcagagcagatgatatgcccctactgtttaactgccttgccagacgaattctctccagctgtttcccaagcgcacagggaagccattgaaaagcatgcccgcttccggcagatgtgcaacagtttcttcgtagacctggtgtccaccatttgcttcaaggacaacgctccgcctgagaaggaagtgattgagagcctgctctctctcctcttcgtccaaaaggggcgcttaagagatgctgcccagagacactgtgaacacacaaaatctctctctccattcaatgatgttgtggataagactcctgtcatccgctcagtgatactgaaactgcttttgaagtacagctttcatgatgtaaaagattatattcaggaatatttgaccctgttaaaaaagaaagcattcataactgaagataaaactgaactgtacatgctcttcatcaactgcctggaggattcaatacttgagaagaccagtgcttactccagaaatgatgaactgaaccacctagaagaggaaggtcgtttccttaaggcatattctccagcaagccggggccgagagcctgccaacgaggcctcggttgaatacctgcaagaggtggcccggatccgcctctgcctcgacagagctgcagatttcctctcggagcctgagggaggcccaggcaagtcttctctgccttgctttcctttgggtttaaagactccgttatttagaaattcaggaagtatgggaaactagttcttcgaatagactactactgggcttttctacatcccctctcccctggatgtgtttctgtgaatgcctgtg

SEQ ID NO: 741 - DNA, 526 bp, Homo sapiens
  misc_feature: Incyte ID No: 249096.16
gcaactcgactgtatacatgaatttgcctgaaaagtaccatcaatgataaaatgacgcatcgttataaaaggaatgaaaaagtaaaactaaaaacaactaaagtttctggaactataagagatctgacaagctttggaaaaacctttcctcagtatccagaatcataagacctagagtaacacaaggctttttcttccttcagctaccaaaacatcaaaaagaacccgccctccacgtcccagacctaaaactacaccgagccctcaggcacctgagaccaaacctggtaaatctgtgattccttggtttaagggtgatccctggcagcctgtcgcagtggggactgaagcagtgtcaatgctgagcagcaacaggtcttattctccctaagcacgagggcatgaggcatcatcagtaccatctcctctgctcagctttcaaggagaataatgtgtgggtgagacccaactgatgccagcatatcttattatttctatgtgagacttttctttgaaaccacatagt

SEQ ID NO: 742 - DNA, 179 bp, Homo sapiens
  misc_feature: Incyte ID No: 246609.1
  unsure 98: a, t, c, g, or other
cagcgacggcggcccgggacccgcgggctgtgaaccatgaacacccgcaatagagtggtgaactccgggctcggcgcctcccctgcctcccgcccgancccttctgggcggcaaggggagctgagccccgtggaagaccagagagagggtttggaggcagcccctaagggcccttcgcg

SEQ ID NO: 743 - DNA, 1777 bp, Homo sapiens
  misc_feature: Incyte ID No: 244366.14
ctccgttccttctcctttccagctgcaactctgagtcaagtacgctcggagaagcatttccaggacaaggtctttctatgcgcccgtacccaccgtcacggcctacagcgagaccatcgtggcagcacccaactgcacgtggcgcaactaccgcagccagctgaccctggagccacgcccgcgcgccctgcgcttccgcagcaccaccatcatcttccccaagcatgccaggagcactttccggaccaccctgcactgcagcctgggccggcccagccgctggttcaccgccagcgtgcagctgcagctttgccaggaccctgcccccagcctcctgggccctgccacgctctgacggggctggggccggcccggggtgctggaggagccgggagccctggggagaagccgggaggatggacacgatgagctcggcctggcactcgggcaggaggcgggaagggaggctgccagaccaaggacccgtgtggaaggaggcggctccccgctgcctgccctgacctacaggctaggtggtggtctccttgttttggtgtcaaggactcagtaaaagcatctatttttttagcacttaagctggcaaggcggtaggggcatgcactgttaggtggtggccacccccagggtcaggggaaaagaatgggtccatagagtgcccttgaagcagagaacagccccgagcagtgtgaggacagaggcatcccagcctcagccggtgggaacggctgccactcccccagagccctgccaccccatgtgtcctaggctggtggccaaggccatgtgtgagggaagaggggtacctctcttccctgctgctggcctggggtatttccaaaacagccttttcgcacacatgcaggttgcaccgagaggtctggagctgtggctgagccacctctggtggatgttgagccaggaggttgggcaaaggccggatgctgatgccagcgctggaggtggtgatactgggggcggggaaggcctagaaatactttgagccatggccttgccagtgtcccgtgccctccagtgtcaaagatttggggcactgcccgtcgaaatggaaaggttggtgctcagcctctggagcctcacctgcagggcgtccccagctaacacccatccacgcaccacctccaggacgagaacccttgatgtcaaaaccaagtgcccagtggaggcggtgaagctctcggaaatgctgccacctgtgtgaggccgggtctgaactcgagggagtcggagctcagctgtcggtttaaagagacactgaggggaccgggctgccgccctcagcctgcattcctgtgcgcaatcgattccgcaatgacagcaccttactccttcctgcggcaggctcacccctgcctgtgggatgttgtgagaggaacatgagccagacaaagacttggctcagggctccgtggaacaagccagcactgtggcagggtgctggggagatgcccctctgagccttcctcccccctcagaactgaatgcaccccacagttgggggctgcccctgccactcccctggtaatgcataaaaggggaggggaaggttccctggggcttgagctccctctgtggaggtgaggaggggagattccgttcacatccaggaggggcaaaatgactgatgtatttttatgtatctacacagagagtgcattttctctccagagatgctgtctggttaacaaagggataacttaagaaattgattgattatcttaataaactgtggaaaccc

SEQ ID NO: 744 - DNA, 547 bp, Homo sapiens
  misc_feature: Incyte ID No: 089187.1
gtaaaaagaaaaactgcctataaggtatatgttacagtttttaaaccttaacagtctttagaggtagagaatgggtctggtgcaaaaatgctcagagggaccaggttggtcgtacagatgaggaaagcatcagcatgggaggtggatcagaagcaaagggactcgtgtagtttggagcgtgcatgcctcatctaaaggcaacagcagctactttggtctccctggcacttattttataggactaggcctcagtgttgctagatcttagacaactttaagagaaatctgcagtctgaattgttatattgagttcttaacttaaaaatatgcatacagaacatttatctgtaaactgaatttggatagaagattactagcttacatcccgtaatgtagaaatattttgaacatgtgcagttaaacctagaaaactagaaagaaaagaaaaaagatatgtaatatctgaattattcagataggctaatattttgctaaattctaactctcccatttgtatctggatggtaataaatacttaagatatttt

SEQ ID NO: 745 - DNA, 2344 bp, Homo sapiens
  misc_feature: Incyte ID No: 1383283.1
  unsure 94, 143, 2332: a, t, c, g, or other
gacagagcagcctgcatctgctttatgctgtctggagggaagtggtctgaggcaggctcacccgtggaagtgctcacgtattctgtatttttcnacactggagctgagattcttctcttcacagccttgcagagtaagtcagngcctacaagtgtaagaaggagctgtaatcttcatgaggatggttatacttcagtattcttaaagagaacatgaacatttttgagctgtatgttcttagggacaactgtgcttcgatgtggtcagtctcgtcacttgtgagtagctgtgaaatctttagtgtgcatgtgtttgcacctctgtggtctgtcaacgtggctgtcactgaaggagcaagagaccatcttttaggaaccctgccaccaaataataatatatccaggcttagactttggattaatgttaaatgtacatttttttggttcagtacctgaagaagaatactgaaacttgaatctataaattcctatggacccttttaatattaaacacaacaaattaaaagttgttataggtaaaataagttcagataaaatagtggtggtatttaaaataatattgctgaagtgcagattgaaatactttttaaacaactgaagttctgagtttttatagggaatttcatgtaacaagactggtttagaaacgtaaagttgcgcagtcaacataaataaatacagaatgccatgtttcccacttctaagtaaagacagtgggcagcttctgtttctccttctatcaaggcttcaccctatcttaaaggtctgtggtgcctcccacgtgggacctgtctgctggtatgtgttaaacagcagaccggcccttctaccagatcttgatgcctctgattttctcctgcctacaagaaaatacaggcaaggttagtcaggtctggctatatttccactgttgtttcatttaataagatggcatctcctcttgagatatgttcttcttaccttttaagaagatactatttaagaagtgaactattcagtctttgtatactgaatgctttttccctaaaaaatgttaatcaagaatattgaatatttatggcactcttgatgctgcatttgaaagctgaaggaattactttagatagataggaattgctacctttattctggaaaggttttgtttctgcctcaaagcattttgaagtgttttaaccattaaagggtctaatttttttttcttaatgaaatcaagcattttaattcactgtgggaggcatcctgaccacggacatccataacagcaaagcacaaatcgttttcgtctgtagtcatatcctgaaacataggtggacaaatttttaactgagagacaaaaatcacatagttgaattgagcagaacacttaagtgctttctgcatctatttaggagtctatttcttaccaataaacttgacaacgcatttggaaaactagtgaacaccttacagctttcattttgctttaatgtttcaattcaagccggtgtaaaaataatttccaaggcatttctgtttattctttagtaatctcactactggctatgtcagcaatatctttttcaatctggttccttttgtatatgatgtcactgtgacctctttgaaatatagtgatggcttttacctactttgaaaagaattttcacatagagtcagaaaaaaaaggaaatatcaaatcacttgcctttccacttggagagcacgacagttgccaacaacaaggggtcaagggccgcacaggagatgtgtgggggcctggccacctcccacctgctgcccagaggcttgtttgcattttcattttttctccacttgtaacaaccatagtttcagctcctaaattcttatcatggatttacttagtcatcttaactgacctgcagttacttgcctgttttcagtgaagagagagaagcagctctggtgccacatgccagtgccatggagggaaatgaattctctgcaatctgttgtttcgctgattcatgaagaaagtaacaactgttgagtttcagccttgatggctgtcggcagttttctggtgtccacccaaacggagagacagtcactcctgcttaccctaatgtgtgactgagaagcagcctgggtgtgtaaagagatagtcattccccctgcctgtctcactgtagggtagcattatccactgtaaaaccatactactttcattttctgtggggagcaggcaaggcggaggtaaggtcaatctcaaaccccagaacctgggaattgtggtccagctccatgtcattcctcggaggctgagaactagagacagtctgcgactggcccanagtcacacagca

SEQ ID NO: 746 - DNA, 412 bp, Homo sapiens
  misc_feature: Incyte ID No: 1397728.1
tcttttcccttcttatcattcttcttccaaagatctgctgtcacttgtcccattttccccagtcctctgccacagccccaccttaggcatcccagctctcccctggaccattacagaaacctcctggctggcctctttttcagcttctcccatatgacccttcttggtacacatctttaaacaccagagtatatagtatggcgcttaagagattggctctggatttacaaagacctggattcaaatccaagcttagccattctccttgctagatgaccttcagcaagtttatcccctctgagcctcagattccttacctgtgaaaatgggagtgcccagcctgggttgttataaagattcaattatacttggataatacagattagtattgtcctggcacagtaggtgtatt

SEQ ID NO: 747 - DNA, 113 bp, Homo sapiens
  misc_feature: Incyte ID No: 096421.1
ctccaccagcgcccaccccagctgaggccttccttaaacgcaggtccactgccaggtgatgggaggggccatccaacaagcttattatatcttcatagctgagactccatctc

SEQ ID NO: 748 - DNA, 263 bp, Homo sapiens
  misc_feature: Incyte ID No: 171619.1
  unsure 225: a, t, c, g, or other
gttaccaataaaaaccacggcctcagagagaacgtctgtgtattattttaatttaactcatttgcaagctggagctgaatggtttttaaaatattaaatattgaattccaagtgagcagtaaatccttaatccttgaagtggtagcagatgccaaaacttcaaaactgtaatcttaaattcagagaacttccctccagacttcacaagtctgattgatgactcgngttagctctgtcttggtcacgcatttagttgtagttac

SEQ ID NO: 749 - DNA, 570 bp, Homo sapiens
  misc_feature: Incyte ID No: 987395.7
gttgatttttgtgtgtttctgtgtgtgtggttttgttttggattggtaggtttcactgtggcgtggttttgctgttgttattttgcttgattctggaaaatgctgaggagatggactgagctatgaagttcaatggttcaccctttaccatgtttgcaggagatgatcgaatacagatgaccctgctgtcgtgtcttcatttgtaaaattctcctacaaatggagacattgaaggattatgtgtatggaaatttttacaaaattcctttctgtacctattctgtagatgcctgtataatcggtctggatgtacagctataaatgtgttgtgagagcaagagagagagaatgggtagagcctgctgtaccttttttcttttaaattcttcgagttggtaaatgagtaagatattggaaaccttaatgaaaagctgctgttcatgatttgtgtgtatagtgagctgactgtagtattttactattgtctgttaaaaaaagaaaaactgtaatttatatcccctttgaactttattgtgtttaattggtacacatttctgtgtgtgtgtgtgt

SEQ ID NO: 750 - DNA, 3836 bp, Homo sapiens
  misc_feature: Incyte ID No: 198795.2
  unsure 106: a, t, c, g, or other
cactgatgggaccgaagccagtgcacacaccaggaaacctgcccgtggctgacactgtcctccagcctgcattctggggaggctgtgatgggcacgtttgccaacnccccccccccagtagagcccaggaccctcctctctcagcttgccagtgccctgccctccacatggcggggaacagcatcaatgtaggtccattgctccactgagagcctctctggaacagtgcccacgttttctcaactatgtatattctgctttgtagtctgaggttgattttctagaggcgaggaaggggctgagttctgccctcgtgctgttcgctggtgctgatcagggccaagacgacccttccctctcccccacagcctgttgaggtgccgttgacgtggacagcgcccctcccttaagatgcccccttgccgttgccatgagccgctgtgactcacgcgtgcactgggccttgcttggtgctcccctcctcctcctgtctgagatcggagcttgctggagagcaccccaggtcgccgtgcttggctgcaggcccgtccctctctccccatcctcgggttcccagcgtgttttgtgcttgaacttggtggactcatcttaccccacaagagtggcctgctcaacctgcagcctccaatgtgccgtaggcgctccaggtccccgtggcgcccaggacaccaactctccctccctgcacttaggatgttctggaaatgaggggaaatccacattcctgccccaggaggtgggaagcctggcaacgatgtagcttcccctgagatgcggtatgatcaggcctcagcaactactcaggaggcaaaggtgtttggaaagcaaaccccaaacctcccggcacggcatgtgctctgcttccgtccctcaccgcctgcacaaggtcgttgagacttttctagaactccccggggttgtatttatggccttcaagcaaacaaattgaaaagcagtcaaggaggagttcagatagaaaagtgctggagatacacatctttccttcaaaggaaatgtaatttatttccaaccgctgcctcagacgggggtttcacatgttgtgaagtcacatcttgaatgactgtcaccctcatccttccccaaaaagctaaataagggcctttggcatcaatgcgtgcattctccacctttccgcggcttgcgcttggatttctgagtggctttcttcagggagcccttgtggtcatgtgtctttaatgctgctccccatgcccccaggccaggccagcacgctcaggtgatagcgagtggggccaggagacccccctgccctgcccagtggacagatctgccccagccctgctgtggggacgggccctctatcatttaaccacatacattaggttgcttttcagcaaaatgtcagctttcctcccattatgcaggagagagaaggggcgcaggtgtatctccttagagtacaccttggagctggatcactaagaaacagtcctcagactggtccttccgacacaggcagagagtgaactggatcgctggcccctgggatgctgcgctgtctgtgattagagagaagtggccagtgtcccgtctgtgattagacagaaacccctgtggcagactcctcccctctccatgaagaaagaaatatttacttagatattactgtttcaaaacacaaactttattccccttagagaagaaatactgcccttaaatagactgttgaaatattaatggcccccccatttaatcagtgtgtctgcggctttcttcgcgtcacatgtccgcattggcaggtgattctggaaagggattctgggaaaccaacaagtcttttttaaatctttgagttgtatgagaaagtatttaagttcaccagtgtagtaaacacccaccccagagcagcggtaagcaaacctaaatctgaaaacccattcttactgtctttcaccatgagatgctggttttggtgtaaaatgacagcacttggtttggggttttgcacctgttgggtagaactgttcttgtctgaggtcctcaccctctacagatgggcctcagggcctggaggtgggcagatggggccagagtggccagcagagacttgcatgggctctgaaagccccagagctcaggcctaaggctgctaggtgagaccagcaggcagctgtggcatccgaccttgggacgcccaagctgggcagccgctccatgtgccccaaacaggatatcctcatgaatgtgaggagaggctggctcagggcttggttttcattttggcctggcacagggtacctgtagggagcactcccccaacctgaggatggtgaaaccatatgatagagactccttgtcgaagtccacatcggactgatctagaatgccccgtggggggattgcatggcctttgccttgagatgcaggtgaaagaaaggaaccaaacaaggcatgagtgtgttggggaatcttcccagtggagcaaacccccttaacacaccagctgttgggaacagctgcccctaaatccaattaaaccctcatctccctggtgctgaacagtctacactggcccaggaagctaacgtctgagccgcttggagagctttggtaaacagaagacactggaagcccactcggtcagcagctgggcatgaggatgtcaggggcctttggacttgaggaaggacagtccaggtgcatggaatcctaatgggcctcatgcagacactggaagcagcccagccccctgcccaataccacagccctggggtgtcccctgacattcctggaggtccctgggcaaatgcatttcctgcctgggttctcagggtaggagaacagagaaggctccaagggtgttgggagtgagccaggggctggtctggggagtgggtctcacgcactgctcaggttggcacgagggacctcccccatcccaacccagccccaagggtcccgagcagggctctcagcatggctgttttgagggtacacaggtggctggagaggggtggggcagttgcatggtgggtggcaaagtgtgcatttagaagctgcttcgtggcgttaagaacggggggagagggaccagcactgtaacgttagaaataattccttcttgcagacttgaaaagcatcagtttccctcccacggctgggtttttgtgtctgaaatacatctaattctccagactgcagcccctctcagccccgagcacctgagcgctggggaggcccttattgagctcagcctggagaggggagggtcgcacgggtcccgggggcaggtctcctgcactggctcttcccttctgccagcttggaatttggttctcatcttgccacaggggtgcgtttcctaaagggcagccggagcagctcaaaggtgacaactgagatgcatttctaggcaggggcagggaaggccaacccaccttgcagccagttttctgtttctgtaaatagcagtgtatagagatggaagggcagcgtgggtgtatccacagatgggtttaggttttttttttggatgttttctattacctcattcagcaactttatgtttcacaatgactcaatgatgctttatttatattgtttgtactgtaattaaaaccattgacagacatttcactttgcttgttatttcatatgatcttgttttgattaaatatgccagtttgtattttcctgccttgggatttttttgtgtccgctgtacagtattctaagggaaaaagaaaaagaaagatgtgtaaagtaacagagagaggtggctatggtgtagagacctctttctaataaagaaatgaaaatatgtctacaaaaaa

SEQ ID NO: 751 - DNA, 1315 bp, Homo sapiens
  misc_feature: Incyte ID No: 403987.1
gccactccaggctgctgctccatctgcatgaattccatgcaggtggctgctgcaccccgctgctggaccctggcttgcctctcgtgccccagtggaggtctggttgatgagcagtcgggaagtgggtctggcgccgcaccccggctgcagctgtggcaaactgcaaacgatgacacacagtgcttgacgagggcctttgtcagaagcaattggggatctggcgtcacctgcacaatggaaaacaaagtgcttctgcctggctggccagaatgcacgtttgctcactattgatgctggggcatttacaggcagaatgagttcatgtgaaatttcaggatctgccatgactcagattcactttctgtaaaccagagtcaacattacatttccctttactctgggccattccttgaatttttaggtcaccagttgtttttgtactaactgaagggatttgagtatttcacaagcaccttatttttattagcatttttagggcattaccaatttgggacggatctgtagtgtgagagattgttgtcactcttagctccaaacataggttgactttatatattatttacatgttcagaattatactgtgtagaaattcaaatgaaacttgcaaaatacttttctggcaggaagccctggagaggatcgttcatggaaacaaggatgacgactggggtaagaaatgcaggtgactcgtgagtggtcagggagtggaagagaagacggctggaaggttttagcattcagaaaaaaaaatggagacaactagagttgaatctgaaggattaatggcagaattcaaatattgggggaaagaataccaagatggggggttagaaaattagaaacagcagagctccacaggttggaaaggtttggaaaggatttgagcaagagtacaagaaggagcctgctaatagcacccctgggtttacatcaaagagaagcaccctggagagaattaactcgggaggaggtgggggcatgggaaaccttttacatctaccaagagcggggaaggaacaagaagctggccctgaacttgaaggtacacccaggtagcttgcgtgggccaggagaaggtgattctcttctatgcctctctccaaacgccctgcttctgatgctgctcctctacctgtattgaggggaagatacatccctaagaagttccctgaaccccattctttgttgtggctaactggtccccttggaatttttctactaattttcaattccccctctcaccttggtgaaatcttgaatcttactgttcaataaaagttcttctaccgaaaaa

SEQ ID NO: 752 - DNA, 245 bp, Homo sapiens
  misc_feature: Incyte ID No: 034851.1
gaataatttggcctcctcttccctctgccaaagggacaggggcaggacatgagagggatgggtgcacttttgggtcagggttcagctttctggtgtgacagcctttctcccttaggaggctgctaagtcggtgagacctgggcactgcagccgactgcctgggttgaatggttgaatctcggctccagctcttgaccagctatgtggccttatgggggagtccgtcacctttctgggcattagtt

SEQ ID NO: 753 - DNA, 66 bp, Homo sapiens
  misc_feature: Incyte ID No: 189905.1
  unsure 48: a, t, c, g, or other
tgacttcaagtaataatagcactttctgtgttccttcctagcactttngattaaaatgtgtcgttt

SEQ ID NO: 754 - DNA, 280 bp, Homo sapiens
  misc_feature: Incyte ID No: 002406.1
gctcgaggttctttacatattctggaaacaagtcctctgtcacatatataggtactttgaaaatctgtgctttgcctttacatttttttaatggtaactttttaagagtagatagttttggttttgatgaaattcaacttatcagtttttcagttatagtatgtatttttatgacccatctaagaagcatctgtctacccagagttgcaaagatatcccttttcttactagaaatattatagttttatttaccattgcttctatgatacattttaagtta

SEQ ID NO: 755 - DNA, 390 bp, Homo sapiens
  misc_feature: Incyte ID No: 116204.1
  unsure 371, 382: a, t, c, g, or other
caccaaacagatgcctcaaattcaccctgactgcccctgctccccctggatcttagcagaaatttcagtgtggcaaacaaagcagatagagttcctatggggcctaaagcttatgcaatttgggaaacttctttaaccattttttttttgagtagtgagattttagcatattttggctaaaatatggggaaaaataatgcccagtgagattacatgattttcctgggattgatagattcatgtctcaatttccatcagagaaagggagtggggtggtgaggaagggaaagtggtatggagagttaggaccctttgccttctttcaggataagaaagaaaaggaatagccgagcttgccatacacaagcggncccattcattngtaatatt

SEQ ID NO: 756 - DNA, 497 bp, Homo sapiens
  misc_feature: Incyte ID No: 1097147.1
agaaaccagaaggttgtgtggaagtaagagaaaggatagcagcctagggctttaggaccggctggaaaccaagttgagtgtggaaaggatgaggggtagagtagttcaggacctgaacgaaagatctttgtagacaaatgttaggctctgcaaatgggttctgcggcaggactgaggtgggattctgtggtgaggttctgtgagatctgaccacctggcccccgtatctccctccactggtggcaggtgatgtgctggcatccctaggcagcagtgtatctgcttcctgtctggggtgtgagctgcatttattctcagaatgatctttattgataagacttgagctggccttcctatcatggatgtggaatacattagtgaccttacaaagttggtgggaacagatactttaccttcttaaacaggagtttaggagcagtgggtccccatcttttggactagctcttaacgttacttttccccgctgtagtgtagca

SEQ ID NO: 757 - DNA, 2777 bp, Homo sapiens
  misc_feature: Incyte ID No: 018917.3
  unsure 1289: a, t, c, g, or other
caattaattttcccaacattcttctcccagtgctgggaatcacatttcctctgttctgtgcagaagacaaaaaggcaatcataaaagtttgttatatttgtgggggtgcctggaggaggattttcctcaacttaatggagccactgtccataaagtggctgttatcccttcatataattggtgagatcagccttctccttgacttggcacctaattatgcttcatgagatcctagattccacctgagtcaattgtgtccagagccccaaaccaggatggagttgttttccccagatatggggttctattcagccatagataatctagacagaggatttcagaatgaaaggaaaaatgtgtggagattagtcctagttcattctgagggccgactaagtggctcagccagcttcttactccatctgcagttcatactgccaaagagctcccacttccaaatccccagtgactttatggagaagattctgcattaaattgtctttcgaatgatggggaagcaaggcataatatgcgatgatgaggagaaagtagaccagtgaggtgattgcaagactaacaaggagactcaatgggaagtttttctttcttttagatattgcttttgaagtagatggtaaaatttttgtcatccttcttgtattttttgtaccccaagttacaatttttcttcttccttgtaaataatttaaacagtatttatttttgtaaggcataactagaaactaaaatatattctaaaaaattcattattctgaacaaagtgatcaaattagaatacatatttttcaacagtggtagagcttttaatatatgtttattgaaagttatctataatacttgcaccagtgttgaaaaaagttaacatgtaggcaagagcaatatgtttgtctcaaggatttttccatggtttcctcagtgatggtgtcctggaattattcaggtggtgaccatcactggtctaagtttgtgtgcagggttttcagatgtgtttttgtgaaacttggtagaaccatggctaataaagaggacagtgttgtcagggtccatctgccctccatagaaaaatgtctctggctcataaaatgagactccctcagggactaaatatgaactgacagcagtaactctgatacagaataatctaaattgcatcaaatggccttaattcagagtttgttaggcttatcagtatgttgcttttaattggggtgggaaagtagagggagagaaagcaagacatttattaagcacctcgtatgtgccaggcnctaatgctaagcacctttacataagttaggattaatccctgcaagaatcctataaagaatgttactagcatttacacttcccaaatgaaggtaccaaagctcaaacgcaatgttgtgaagctgtttccttcagatttaggttatgtgggatgatgtgggattgaagaggaaagaaaggtgggattatccccctaggaagactttcaggcctgacttcataggaattcatccatcttatcatgtggagtttatctcaccctgctgttgcaggatgctatttgcatgtgtccccaggtgatgttttttctttggggagtaggggtttggcttcctcattcatccctcttgctaaaagaggagatagttgatgttgcatctaaagatgctataagacaatgaaagtttgatgttgtacatacctacaagtaccatttttgtgcatgattacactccactgacatcttccaagtactgcatgtgattgaataagaaacaagaaagtgaccacaccaaagcctccctggctggtgtacagggatcaggtccacagtggtgcagattcaaccaccacccagggagtgcttgcagactctgcatagatgttgctgcatgcgtcccatgtgcctgtcagaatggcagtgtttaattctcttgaaagaaagttatttgctcactatccccagcctcaaggagccaaggaagagtcattcacatggaaggtccgggactggtcagccactctgacttttctaccacattaaattctccattacatctcactattggtaatggcttaagtgtaaagagccatgatgtgtatattaagctatgtgccacatatttatttttagactctccacagcattcatgtcaatatgggattaatgcctaaactttgtaaatattgtacagtttgtaaatcaatgaataaaggttttgagtgtatcttaccaggctcctccctgcaaatgcacatgtcaatcaatgattaatgcacccaggttatgtacaaggcactgggcttagcaccacagggaacttccttccagaggcttgctttctagttgtgtagacaagaatacatgcatgagaagatacaagacaattcacccatgccaaatgattcatacaggctgtttaagtactgcagaaaataaaagaaggaaaggctaccagacttttcaataaggtctacagcttcccaagagcatgtctttgttaaatcaggaaatataaaaattatgtgtgtatgtgtatgtatatatatataccaccctattaactattttaaaatcgtattctattttgggggttgtgttaatgatgatgaaccagaaaagattttctcttgatggtttcttcaacaggaaacagatattggaatagtgtacatgtcatttttatctatacaatgaatttattatgtttttcttagtaaagtgatagacattgaaagcaaaaaaaaaagtcgacgcggccgcgaattta

SEQ ID NO: 758 - DNA, 687 bp, Homo sapiens
  misc_feature: Incyte ID No: 016106.1
ccccattaattgaattaataagggagttttgtcagtttagcaatatccattagtttcagagagtgtttcagtattattctgtaaaagcatccagggatatattttacagctacagcatagattatcttgcacacatattgaagtaaagatacctttcaacattccagatactgacttttcacccaaatttgaaaatctccatttagcactttctaaaataccagtgaaaattaatatagttttgtagatttatgtactaagatgcagattaagacatgtggaatctaatgaacatagcaggaaaagaaaattttctcaagtctgttcattactattcctcatcacattttttattatttaatagcttattccttgaatatgtgtgacttgggattagatgtgccagttggaagacctcagaggttcagaaattcacagacatgtgaaatataaaaccgtattcatttagcagatactgataggcatataaaatagaaccttcatcatctatctttagaaaaagaagattaaacagaagtgtaattaatttgccaactctgcttcccgattgagacatttatcaaagttgatctttaatcattagtttcctaatctgtaaaatgaagtctattatgacctctaaggtctatttgtaacagttaggattaggttcagttccatatcacc

SEQ ID NO: 759 - DNA, 671 bp, Homo sapiens
  misc_feature: Incyte ID No: 252683.7
  unsure 36: a, t, c, g, or other
ggcgctgcagtctctgcgctttcgacgccgcccggnggcccaggcggctgatgcgtgtgggcctcgcgctgatcttggtgggccacgtgaacctgctgctgggggccgtgctgcatggcaccgtcctgcggcacgtggccaatccccgcggcgctgtcacgccggagtacaccgtagccaatgtcatctctgtcggctcggggctgctggtgaacgcggcaggcgacccgggcgggggccgggctcccggagagcccagcaggccaaaggctttgtgtcttccacagagcgtttccgtgggacttgtggccctcctggcgtccaggaaccttcttcgccctccactggtgagagggacttaccctggagcttttaacgagtaggcttgagtcagggaaatgggggctgactgagcttggtctttcaatagattggaggagcctcagagaaactgggtgtctagtcactgggagagttagccaggcccaggctgctcaccctgatctcctgtccctgccagcactgggtcctgctggcactagctctggtgaacctgctcttgtccgttgcctgctccctgggcctccttcttgctgtgtcacttcactgtggacaacggtggccgcgacttattgctgactgccacccaggactgctggatcctctggtac

SEQ ID NO: 760 - DNA, 1053 bp, Homo sapiens
  misc_feature: Incyte ID No: 252683.4
gggacggaggcggggcccaggttggggcggggccgggcccaggtacagcggccctgcggctggcgcggcggacgggatgaggcgctgcagtctctgcgctttcggtaacttccgggccctggcgtctcgtctccttaccctggggctacccttgcccggtcctactgcccgcggttaacccgccgcgagccgcctctcccctccccgcccgactcaaccctgccctcccccgtgctttgcagacgccgcccgggggcccaggcggctgatgcgtgtgggcctcgcgctgatcttggtgggccacgtgaacctgctgctgggggccgtgctgcatggcaccgtcctgcggcacgtggccaatccccgcggcgctgtcacgccggagtacaccgtagccaatgtcatctctgtcggctcggggctgctgagcgtttccgtgggacttgtggccctcctggcgtccaggaaccttcttcgccctccactgcactgggtcctgctggcactagctctggtgaacctgctcttgtccgttgcctgctccctgggcctccttcttgctgtgtcactcactgtggccaacggtggccgccgccttattgctgactgccacccaggactgctggatcctctggtaccactggatgaggggccgggacatactgactgcccctttgaccccacaagaatctatgatacagccttggctctctggatcccttctttgctcatgtctgcaggggaggctgctctatctggttactgctgtgtggctgcactcactctacgtggagttgggccctgcaggaaggacggacttcaggggcagctagaggaaatgacagagcttgaatctcctaaatgtaaaaggcaggaaaatgagcagctactggatcaaaatcaagaaatccgggcatcacagagaagttgggtttaggacagcaggtgctgttccgagactcagtcctaaagggttttttttcccactaagcaaggggccctgacctcgggatgagataacaaattgtaataaagtaacttctcttttcttct

SEQ ID NO: 761 - DNA, 2540 bp, Homo sapiens
  misc_feature: Incyte ID No: 1384695.63
  unsure 135: a, t, c, g, or other
ggacaaagaagggcgcgggagacacggctgaggaagcctttactgcggggcggccggaggatcgccgagctcagggtcccccaccgcatgcgcccggcctcgtcctctgccccaggcccggccccgcccccagcntcggccccagcctcggcctttgccggaacgtcgccgaacacttcccggtgcatggcggtgacgtagttggagccgctggggtcgtccaggcgcatccgcagcaggggcaggaagcgctcggtggtgaagtagcgcagggtcggcttcggggcgcgcaaagcggtgaggaagacctgcggcggcgggaggagagctgtggccaccgctgcgcgccggaggacgcaccgcccccactcctggagtccagcccggcgctcacctccgccacctcctcagggttctgcgccgcctcgcgaaagacttgcttgctgtgggcgaggtattggtagaagcggtggaaggtgtggatgtccgtgcggtccagcacctcctctgggctgcccaacaccttctccatgaaggcggtgtgcactgggccgcactcgatcaggctcaagctgctggccggagagcaacgagtgggagggggcggacgccagccaggccccagtcccagccccaaccccagtcccagccccaaccacgtcccggcccccgaccgcgagcagcaccgctgcgctgggaagtgaggcggaaagggcgctggggataaccagaacatttgaaacgcgggttcctgccggagcagccctcccaaatccatctgaggctacaagggagccctgtgtgtcaggattcgaatctagcggggtccctggccgctgtgtgaccttgggccagtcacctaagctctctgggctggagcttccccataacaataccagacacttcagcagctaggtcagcaggtggcacaatgcgtgccatgcgcccagcccaagtgcctggcacacagctaatgtgagccgggcagagagggccagggagatcgccccagagcggctcccgcaggacagggtgctcggcgtctctaggtcagagttaagagggttcggggaacgggggtgttgactcactggaccccaaagggcagcagcagaaccgccagactctcgcataagccttcgagcgcgaacttgctggcgcaataaacgtcattgaaaggcagcccttaggtggggagacgaggttcctgaggcgcagcggccagggggtcatccccgggcagacggtgcccctccaagctgacggcaccccactccaccccccccgcggaacctgccttcaaggctcagctccgcacacaaagaatctggagctgccgaggccactccctaccactcacccatcaatcctcccacgctcccggtcaccaacacgcgtcccgaaccgcgcctcttcatgtctggcaggaaggcctgcagcatccgcacagtccctactacattcacgtccagcacagaggccacggcgtcctcccccagcgcctccagcggccccagcaggcccaggcctgcgttacacactgcggagacaagaggcccgaccagcccgcctcagcatcaccctcagcacggcctgtcccctcgtgctccctgggcctgggaacatgttggtttcaacgcagggcggagaaggctcctaggagcccatatgcttccaggaggctcacccagcacgtccacgcggccctcagtcacgcgttcccgggcagcggccacggattttgagtcccttacgtccagctgcaacgtctccagggatcccggagggcatgccagggcccgggccgcctcccacagccggccctgtgttttcaggtccctcaacgtggcatacactggaggttttgggagaggaggaagatctgacttcccttctagcctccaagggctcctcccttctctccctccctgtccctgcctatctatacctttgaagctctgggatggatctgaagccagacgtacggccaagtgcaggccgatgcccgaggaacagccggtgatgagcaccacggtgcgggccatggtgagactgtggggagaggctggggctctgggcttgatatcacctgcttcgccccgccccgcctgcgggcccccaccccttgttgtgtctcccacgcaatctcaaggataagccttcctgcgggtccctggcccgctctccccaccctgttctgagccaaaacagacatgagcccactgcttggaacaacaaactgtcctggttgctggtcagagggaggggaggctttacaagcaggtgtgggttcccacgtgggcacagagtggccccctgggcagattcccctgggtatgcctctgtgccacaggagcgattatagtgaccgcagtttgctgcagaggctgtgaaagtaaaggcgttgggaggtgggagatgattgtatatgtgctggtttcgtccagggttcctagctcataactcacatgaccatggttacagtcttacgttgtcatgttggggtacctcaggcctcaaaaaacagcctttcgtctctc

SEQ ID NO: 762 - DNA, 6652 bp, Homo sapiens
  misc_feature: Incyte ID No: 230062.4
  unsure 2708-3015, 4604, 4610, 4613, 4621, 4624-4628, 6640: a, t, c, g, or other
gccagattagcggacgcggtgcccgcggttgcaacgggatcccgggcgctgcagcttgggaggcggctctccccaggcggcgtccgcggagacaaccatccgtgaaccccaggtcccggcgcgccggctcgccgcgcaccaggggccggcggacagaagagcggccgagcggctcgaggctgggggacccggcgcggccgcgcgctgccgggcgggaggctggggggccggggcggggccgtgccccggagcgggtcggaggccggggccggggccgggggacggcggctccccgcgcggctccagcggctcggggatcccggccgggccccgcagggaccatggcagccgggagcatcaccacgctgcccgccttgcccgaggatggcggcagcggcgccttcccgcccggccacttcaaggaccccaagcggctgtactgcaaaaacgggggcttcttcctgcgcatccaccccgacggccgagttgacggggtccgggagaagagcgaccctcacatcaagctacaacttcaagcagaagagagaggagttgtgtctatcaaaggagtgtgtgctaaccgttacctggctatgaaggaagatggaagattactggcttctaaatgtgttacggatgagtgtttcttttttgaacgattggaatctaataactacaatacttaccggtcaaggaaatacaccagttggtatgtggcactgaaacgaactgggcagtataaacttggatccaaaacaggacctgggcagaaagctatactttttcttccaatgtctgctaagagctgattttaatggccacatctaatctcatttcacatgaaagaagaagtatattttagaaatttgttaatgagagtaaaagaaaataaatgtgtaaagctcagtttggataattggtcaaacaattttttatccagtagtaaaatatgtaaccattgtcccagtaaagaaaaataacaaaagttgtaaaatgtatattctcccttttatattgcatctgctgttacccagtgaagcttacctagagcaatgatctttttcacgcatttgctttattcgaaaagaggcttttaaaatgtgcatgtttagaaacaaaatttcttcatggaaatcatcatatacattagaaaatcacagtcagatgtttaatcaatccaaaatgtccactatttcttatgtcattcgttagtctacatgtttctaaacatataaatgtgaatttaatcaattcctttcatagttttataattctctggcagttccttatgatagagtttataaaacagtcctgtgtaaactgctggaagttcttccacagtcaggtcaattttgtcaaacccttctctgtacccatacagcagcagcctagcaactctgctggtgatgggagttgtattttcagtcttcgccaggtcattgagatccatccactcacatcttaagcattcttcctggcaaaaatttatggtgaatgaatatggctttaggcggcagatgatatacatatctgacttcccaaaagctccaggatttgtgtgctgttgccgaatactcaggacggacctgaattctgattttataccagtctcttcaaaaacttctcgaaccgctgtgtctcctacgtaaaaaaagagatgtacaaatcaataataattacacttttagaaactgtatcatcaaagattttcagttaaagtagcattatgtaaaggctcaaaacattaccctaacaaagtaaagttttcaatacaaattctttgccttgtggatatcaagaaatcccaaaatattttcttaccactgtaaattcaagaagcttttgaaatgctgaatatttctttggctgctacttggaggcttatctacctgtacatttttggggtcagctctttttaacttcttgctgctctttttcccaaaaggtaaaaatatagattgaaaagttaaaacattttgcatggctgcagttcctttgtttcttgagataagattccaaagaacttagattcatttcttcaacaccgaaatgctggaggtgtttgatcagttttcaagaaacttggaatataaataattttataattcaacaaaggttttcacattttataaggttgatttttcaagttaaatgcaaatttatgtggcaggatttttattgccattaacatatttttgtggctgctttttctacacatccagatggtccctctaactgggctttctctaattttgtgatgttctgtcattgtctcccaaagtatttaggagaagccctttaaaaagctgccttcctctaccactttgctggaaagcttcacaattgtccagacaaagatttttgttccaatactcgttttgcctctatttttcttgtttgtcaaatagtaaatgatatttgcccttgcagtaattctactggtgaaaaacatgcaaagaagaggaagtcacagaaacatgtctcaattcccatgtgctgtgactgtagactgtcttaccatagactgtcttacccatcccctggatatgctcttgttttttccctctaatagctatggaaagatgcatagaaagagtataatgttttaaaacataaggcattcgtctgccatttttcaattacatgctgacttcccttacaattgagatttgcccataggttaaacatggttagaaacaactgaaagnnnnnnnnnnnnnnnnnnnnnnnnnnnnnnnnnnnnnnnnnnnnnnnnnnnnnnnnnnnnnnnnnnnnnnnnnnnnnnnnnnnnnnnnnnnnnnnnnnnnnnnnnnnnnnnnnnnnnnnnnnnnnnnnnnnnnnnnnnnnnnnnnnnnnnnnnnnnnnnnnnnnnnnnnnnnnnnnnnnnnnnnnnnnnnnnnnnnnnnnnnnnnnnnnnnnnnnnnnnnnnnnnnnnnnnnnnnnnnnnnnnnnnnnnnnnnnnnnnnnnnnnnnnnnnnnnnnnnnnnnnnnnnnnnnnnnnnnnnnnnnnnnnnnttttccttaataagaaaagtaatttttactctgatgtgcaatacatttgttattaaatttattatttaagatggtagcactagtcttaaattgtataaaatatcccctaacatgtttaaatgtccatttttattcattatgctttgaaaaataattatggggaaatacatgtttgttattaaatttattattaaagatagtagcactagtcttaaatttgatataacatctcctaacttgtttaaatgtccatttttattctttatgtttgaaaataaattatggggatcctatttagctcttagtaccactaatcaaaagttcggcatgtagctcatgatctatgctgtttctatgtcgtggaagcactggatgggggtagtgagcaaatctgccctgctcagcagtcaccatagcagctgactgaaaatcagcactgcctgagtagttttgatcagtttaacttgaatcactaactgactgaaaattgaatgggcaaataagtgcttttgtctccagagtatgcgggagacccttccacctcaagatggatatttcttccccaaggatttcaagatgaattgaaatttttaatcaagatagtgtgctttattctgttgtattttttattattttaatatactgtaagccaaactgaaataacatttgctgttttataggtttgaagaacataggaaaaactaagaggttttgtttttatttttgctgatgaagagatatgtttaaatatgttgtattgttttgtttagttacaggacaataatgaaatggagtttatatttgttatttctattttgttatatttaataatagaattagattgaaataaaatataatgggaaataatctgcagaatgtgggttttcctggtgtttccctctgactctagtgcactgatgatctctgataaggctcagctgctttatagttctctggctaatgcagcagatactcttcctgccagtggtaatacgattttttaagaaggcagtttgtcaattttaatcttgtggatacctttatactcttagggtattattttatacaaaagccttgaggattgcattctattttctatatgaccctcttgatatttaaaaaacactatggataacaattcttcatttacctagtattatgaaagaatgaaggagttcaaacaaatgtgtttcccagttaactagggtttactgtttgagccaatataaatgtttaactgtttgtgatggcagtattcctaaagtacattgcatgttttcctaaatacagagtttaaataatttcagtaattcttagatgattcagcttcatcattaagaatatcttttgttttatgttgagttagaaatgccttcatatagacatagtctttcagacctctactgtcagttttcatttctagctgctttcagggttttatgaattttcaggcaaagctttaatttatactaagcttaggaagtatggctaatgccaacggcagtttttttcttcttaattccacatgactgaggcatatatgatctctgggtaggtgagttgttgtgacaaccacaagcacttttttntttttnaangaaaaaanggnnnnnaatttttaatcatctggactttaagaaggattctggagtatacttaggcctgaaattatatatatttggcttggaaatgtgtttttcttcaattacatctacaagtaagtacagctgaaattcagaggacccataagagttcacatgaaaaaaatcaatttatttgaaaaggcaagatgcaggagagaggaagccttgcaaacctggcagactgctttttgcccaatatagattgggtaaggctgcaaaacataagcttaattagctcacatgctctgctctcacgtggcaccagtggatagtgtgagagaattaggctgtagaacaaatggccttctctttcagcattcacaccactacaaaatcatcttttatatcaacagaagaataagcataaactaagcaaaaggtcaataagtacctgaaaccaagattggctagagatatatcttaatgcaatccattttctgatggattgttacgagttggctatataatgtatgtatggtattttgatttgtgtaaaagttttaaaaatcaagctttaagtacatggacatttttaaataaaatatttaaagacaatttagaaaattgccttaatatcattgttggctaaatagaataggggacatgcatattaaggaaaaggtcatggagaaataatattggtatcaaacaaatacattgatttgtcatgatacacactgaatttgatccaatagtttaaggaataggtaggaaaatttggtttctatttttcgatttcctgtaaatcagtgacataaataattcttagcttattttatatttccttgtcttaaatactgagctcagtaagttgtgttaggggattatttctcagttgagactttcttatatgacattttactatgttttgacttcctgactattaaaaataaatagtagatacaattttcataaagtgaagaattatataatcactgctttataactgactttattatatttatttcaaagttcatttaaaggctactattcatcctctgtgatggaatggtcaggaatttgttttctcatagtttaattccaacaacaatattagtcgtatccaaaataacctttaatgctaaactttactgatgtatatccaaagcttctccttttcagacagattaatccagaagcagtcataaacagaagaataggtggtatgttcctaatgatattatttctactaatggaataaactgtaatattagaaattatgctgctaattatatcagctctgaggtaatttctgaaatgttcagactcagtcggaacaaattggaaaatttaaatttttattcttagctataaagcaagaaagtaaacacattaatttcctcaacatttttaagccaattaaaaatataaaagatacacaccaatatcttcttcaggctctgacaggcctcctggaaacttccacatatttttcaactgcagtataaagtcagaaaataaagttaacataactttcactaacacacacatatgtagatttcacaaaatccacctataattggtcaaagtggttgagaatatattttttagtaattgcatgcaaaatttttctagcttccatcctttctccctcgtttcttctttttttgggggagctggtaactgatgaaatcttttcccaccttttctcttcaggaaatataagtggttttgtttggttaacgtgatacattctgtatgaatgaaacattggagggaaacatctactgaatttctgtaatttaaaatattttgctgctagttaactatgaacagatagaagaatcttacagatgctgctataaataagtagaaaatataaatttcatcactaaaatatgctattttaaaatctatttcctatattgtatttctaatcagatgtattactcttattatttctattgtatgtgttaatgattttatgtaaaaatgtaattgcttttcatgagtagtatgaataaaattgattagtttgtgtnttcttgtctccc

SEQ ID NO: 763 - DNA, 2116 bp, Homo sapiens
  misc_feature: Incyte ID No: 898939.9
  unsure 1118: a, t, c, g, or other
ccttattcctgaaaaagaaaactcaagctcagacaggtgaagtgacctgccccgagcctaatgcagttactaatggtagaactgggaccccagtccggccagactccagggcccaggacctgttcgtaacaactgggacctgcaggtggaaaggctgccccaggcgcctcttttctttttgtgctgcctgtaccagtagggccatctttgtagccaaaagtcgggggtgtggggccatgcccagggggacctggtaatgccatttctgcactttgacaaaaactgagttgtatgaatgacttagataatggacattgaaacatttttgtaattatttccctctctctcctcccttcctccctcttctttttctctgtccccctcaagaccctctttcccagctgcccgctcctcagcacccgaagattcgcctgtacaacgcagagcaggtcctgagttgggagccagtggccctgagcaatagcacgaggcctgttgtctaccgagtgcagtttaaatacaccgacagtaaatggttcacggccgacatcatgtccataggggtgaattgtacacagatcacagcaacagagtgtagacttcactgccgccagtccctcaagaaaggcttccccaatggatttcaatgtcactctaacgccttcgtagctgagctggggagcactcccattctgcctggggtgacaatgccttggggttcaacactatcggaatgtgactgtcggggcctcccagaaaacattgaggtgaccccaggagaaggctccctcatcatcaggttctcctctccctttgacatcgctgatacctccacggcctttttttgttattatgtccattactgggaaaaaggaggaatccaacaggtcaaaggccctttcagaagcaactccatttcattggataacttaaaaccctccagagtgtactgtttacaagtccaggcacaactgctttggaacaaaagtaacatctttagagtcgggcatttaagcaacatatcttgctacgaaacaatggcagatgcctccactgagcttcagcaagtcatcctgatctccgtggggaaaattttctttcctgtcggtgctggcaangaagcctgtttcttcctggtcctgaaatataagaggcctgattaaatactggtttcacactccaccaagcatcccattacagataagaagagtatttaaaaagacccaactcagcccatcttaagaggccttggacaaaggacagctcaccaaaggatgacgtctggggactctgtgtccattatctcgtttccggaaaaggagcaagaagatgttctccaaacgctttgaaccaaagcatgggcctagcccactggctccctggaaagagatcaagccatcggagctgctagagttctgtctggactttccagagaccaggtattcccttttgctgcctctaaaaggcctgttccctgcagacattgagagacagctaggttctcatgggggatgacaagcttttttttttttttcttaaagaattttcaaagatcaaatttccagaatgacttttacggagattatcccaggaaaatttaagggcttctcttaaaacactaaaaaaggcatgtaattgcctgttagccaaaatggatatgacacatcctctgaatacttttttcattattggttgggctgagcagtccagaagacctggtcgtcgtccttgactttggcaaatgagccggagccccttgggcaggtcgacacaacctgtcccagcgagggacactgagtggcccttcatgtacaatcccatgggtgtgctggcttaaaatggtaattaatctggttgaatttactcctagtaatttaagattttgttttttaaacttgaaataattgtatttgtatagtgcatgtttttttaaagtctatgtgaagtgttttctttattgtagcctattttctgcagagtttcagctttctaaaattactcaatctaaacttgttttttcttaaataacacctgctagagctactgaggcctcatgggaactcagcaaacacttcctatggatgtcacttgatcctcccaaagtgctggggattac

SEQ ID NO: 764 - DNA, 1598 bp, Homo sapiens
  misc_feature: Incyte ID No: 198818.7
gcagccgctgcatctccgtgcccggctgagctggagtccccgcgcccccgcgttccgcccggccatggctgcggtggcgctgatgccaccgccgcgtgctgctgctgctgctgttggcgtcgccgcccgccgcctccgcgccgtccgcccgcgatcccttcgccccccagctcggggacacgcagaactgccagctgcggtgccgcgaccgcgacctcggcccgcagccctcgcaggcggggctggagggcgcctccgagtctccctatgacagagccgttctgatcagcgcttgcgagcgtggctgccgcctcttctccatctgccgatttgtggccagaagctccaagcccaatgccacccaaactgagtgtgaagcagcctgcgtggaagcctatgtgaaggaggcagagcagcaggcctgtagccacggctgctggagccagcccgcggagcctgagccggagcagaagagaaaggtcctggaggctccaagtggggccctctccctcttggacttgttttccaccctctgcaatgaccttgtcaactcagcccagggatttgtctcctccacctggacatactacttgcagactgacaatgggaaagtggtggtgtttcagactcagcccatagtggagagcctcggcttccaggggggccgtctgcagcgcgtggaggtgacctggcgaggctcccaccctgaagccctggaggtgcacgtggaccctgtaggccccctggacaaggtgaggaaggccaagatccgagtcaagaccagcagcaaggccaaggtggagtctgaagagccacaggacaatgacttcctcagttgcatgtcccggcgctcgggtctgcctcgctggatcctggcctgctgcctcttcctctccgtgctggtgatgctgtggctgagctgctccaccctggtgaccgcgcctggccagcacctcaagttccagcctctgaccctggagcagcacaagggcttcatgatggagcccgattggcccctgtacccgccgccgtcccacgcctgtgaggacagcctaccaccctacaagctgaagctggacctgaccaagctgtaggcctccactggccccatcactgccaactgcagggggcccctcgggcctcacttgccctgagcccaggagtccaagggcagggtgggtccagccttgagcccctccacccccaaatccttcctctcctcccagtcccaccccttgccccacggagtcctggggacgcagtgccccagctgggaagagggcgggatcgggcactggttcctccttgtccccgctttcttgggggcttgctactttttgtcttctattgtgtggctttctgagtatttgaaccccagtcctgtgtcaccttcctttttccttctatgtcccctctctgcggggggggcgctgaggctgagggggagctgcgtcttgctagggcttcccccttctccccatcccggtctccagagacccagcttctgagagacagggtgtgggcatctccatgcccctataaagcgtgcctggggcttgtctggggctggggaggaataaaccatgtatataaaagag

SEQ ID NO: 765 - DNA, 3157 bp, Homo sapiens
  misc_feature: Incyte ID No: 1598735CB1
ggggccgggaccggagccggagctgcggggcgcaccggctagacgcgcgcgggattctcggcgggcacgcccgcggaccatgagcgtccccagctccgggagcagccgcggcgctggcggtgcgaggccggccgcgcggcgcctttgagccccagccggaggtccagagatcctgagagcccgagcgcccagcgccgcgccgggagagttgagaattatggctgcaggaaaatttgcaagccttcccagaaacatgccggtgaatcaccagttccccctggcctcatccatggaccttctgagcagcaggtcccctctcgctgagcatcgcccagatgcctatcaagatgtgtctatacatggcacccttccacggaagaaaaaaggtcctcctcccataaggtcctgtgatgacttcagtcacatgggcaccctcccccactccaaatccccacggcagaactcgcccgtgacccaggatggcatccaggagagcccatggcaggaccggcacggcgaaaccctcaccttcagggatccacatcttctggacccaactgtggaatatgtgaagttctccaaggagaggcacatcatggacaggacccccgagaaactgaagaaggagctggaggaggagctgctcctgagcagcgaggacctgcgcagccatgcctggtaccacggccgcatcccccgacaggtgtctgaaaaccttgtgcagcgagatggtgacttcctagttcgtgactctctgtccagccctgggaactttgtcctgacctgtcagtggaagaacctcgctcagcacttcaaaatcaaccggacagttctgcgactcagcgaggcctacagccgcgtgcagtaccagttcgagatggagagcttcgactccatccccggcctggtgcgctgctacgtgggcaaccgccggcccatctcccagcagagtggcgccatcatcttccagcccatcaacaggacggtgcctctgcggtgcctggaggagcattatggcacctccccaggccaggcccgggagggcagcctcaccaagggaaggccggatgtggccaagaggctgagcctcaccatgggtggcgtccaggcccgagagcagaatttgcccaggggaaacctcctcagaaacaaagaaaagagtggtagccagcccgcctgcctggatcacatgcaggacagaagagccttgtccctcaaagcccaccagtcagagagctacctgccgattggctgcaagctgccacctcagtcctcgggtgtggacacaagcccctgcccaaactcacctgtgttcaggacgggaagcgagcctgccctgagcccagcagtggttcggagggtctcctcagacgccagggctggggaggcgctgaggggatcagacagtcaactgtgccctaagcccccgcctaagccctgcaaggtgccgttcctcaaggttccctcgtctccctctgcctggctcaactcagaggccaactactgtgaactgaacccagcgtttgccacaggctgcggcaggggagcaaagctaccctcatgtgcccagggaagccacacagaactgctcacagccaagcagaatgaggcgccaggtccccggaactctggcgtcaactacttgatccttgatgatgatgacagggaaagaccttgggaacctgcggcagctcagatggagaaggggcagtgggacaagggcgagtttgtgacgcccctcctggagactgtctcctccttcaggcccaacgagtttgagtcaaagttccttccccctgagaataagcccctggaaacagcaatgttgaaacgtgcaaaagaactgttcaccaacaacgaccccaaggtcatcgcccagcacgtactgagcatggactgcagggttgctaggatacttggagtctctgaagagatgaggaggaacatgggggtgagctcaggcctggaactcattaccttgcctcacggacaccagctgcgcctggacataattgaaagacacaacacaatggccatcggcattgcagtggacattctgggatgcacgggcactttggaggaccgagcggccactctgagtaagatcatccaggtggcggtggaactgaaggattccatgggggacctctattccttctcagctctcatgaaagccctggaaatgccacagatcacaaggttagaaaagacgtggactgctctgcggcaccagtacacccaaactgccattctctatgagaaacagctgaagcccttcagcaaactcctgcatgaaggcagagagtccacatgtgttcccccaaacaatgtatcagtcccactgctgatgccgcttgtgacgttaatggagcgccaggctgtgacttttgaaggaaccgacatgtgggaaaaaaacgaccagagctgtgaaatcatgctgaaccatttggcaacagcgcgattcatggccgaggctgcagacagctaccggatgaatgctgagaggatcctggcaggttttcaaccagatgaagaaatgaatgaaatctgcaagactgaatttcaaatgcgattgctatggggcagcaaaggtgcacaagtcaatcagacagagagatatgagaaattcaaccagattttaactgccctctcgcgtaaattggaacctcctcctgtaaagcaggcagagctttgataactctccagagaacctttagaatatcttttcaagtttccccagcttcatctttgggaaagcttactgtttttgataaagtaataatgtgcaaatctgacaatatacaagcttttagtatccacaggatattaaacgtgtaaattgcacagagcacacttatttatgaattgtctaaagttactactgattttaaaatgaataatttattattaaggtaactactgctaatgttgatcagcaaatttaagagaagacctagctatgttggctggttgctttctattatcatggtatttgaccattttagttttaattccatgtcagataagtgtaaatagaagagtttaaaagcatgaaacatttcagaaggtatcagttatatgatattctttaaacaaatatgaaaaatgtaaatactcatgaatgaaaatacatctttttgtgaaaaaaaaaaaaaaa

SEQ ID NO: 766 - DNA, 751 bp, Homo sapiens
  misc_feature: Incyte ID No: 2267574CB1
  unsure 744: a, t, c, g, or other
cgaagtcacggcgcgctcacaatggagctctcggagtctgtgcagaaaggcttccagatgctggcggatccccgctccttcgactccaacgccttcacgcttctcctccgggcggcattccagagtctgctggacgcccaggcggacgaggccgtgttagatcatccagacttgaaacatatcgacccagtggttttaaaacattgtcatgcagcagctgcaacttacatactagaggcaggaaagcaccgagctgacaagtcaactctaagcacttatctagaagactgtaaatttgacagagagcgaatagaactgttttgcacggaatatcagaataataagaattccctagaaatcctactgggaagtataggcagatctctccctcatataacggatgtttcttggcgcttggaatatcagataaagaccaatcaacttcataggatgtacagacctgcatatttggtgaccttaagtgtacagaacactgattccccatcctatccagagattagttttagttgcagcatggaacaattacaggacttggtggggaaacttaaagatgcttcgaaaagcctggaaagagcaactcagttgtaacttggggaagttaacgatccgcccgagtgcagaggaaaaccagaaacgccttgccttcagctgaaccaccgtttgtgcgagctggatgtccttttcagtagaaaagaattttccttttgaatttataccattcancaatttt

SEQ ID NO: 767 - DNA, 4904 bp, Homo sapiens
  misc_feature: Incyte ID No: 1330257.56
  unsure 1363-1365, 1373-1374, 1476, 2840, 2842, 3107, 4210: a, t, c, g, or other
gcatctcctagttccaggtcttaggcagcagagtcgagactgtcaccccaaagcctgtcgggtatcacccatgaccatgtcaggccctaaaaaataccctgaatcgctttcaagatcaggaaaacctcaccatgtgagactggagaatttcaggaagatggaaggcatggtccacccaatcctgcaccggaaaatgagcccgcagaacattggggcggcgcggccgatcaagcgcagcctggaggatttggaccttgtgattgcagggaaaaaggcccgggcagtgtctcccttagacccatccaaggaggtctctgggaaggagaaggcctctgagcaggagagtgaaggcagcaaagcagcgcacggtgggcattccgggggcggatcagaaggccacaagcttcccctctcctcccctatcttcccaggtctgtattccgggagcctgtgtaactcgggcctcaactccaggctcccggctgggtattctcattctctgcagtacttgaaaaaccagactgtgctttctccactcatgcagcccctggctttccactcgcttgtgatgcaaagaggaatttttacatcaccgacaaattctcagcagctgtacagacacttggctgcggctacacctgtaggaagttcatatggggaccttttgcataacagcatttaccctttagctgctataaatcctcaagctgcctttccatcttcccagctgtcatccgtgcaccccagtacaaaactgtaggctcagctctgcccagcagtccaaagcggcatggccaacagagcttcactccttacccaggagtgctggcttatagagttagaagtcagtatttcttctaatctgaggctatgatcagtcccagctgtaggggcccagaggggaggtgaacatgcctgatttttgtgggacaactgtagcccacaaactgactggctggtgagtcttgactcccttccaacacagatgcccaggcacctccagatcattcacttcgcacgtgggccttgtgaagggatttgtgaatatccaggaagaacttagaggaccccatctgagttcggatggtcaggaaacaatctgggcaaaaaagaggcaggcatttcaaaggaaggggcaaggaagactggcaaacagatggcaagggatgcccctctttttcataaaactctccaaggttcaatcaatgcaatgtatagtgaaacttcaatagatctttcattttgacactattaaacaatccagagaagtaaacactgttaaattgactgtatatatttgcttcttaaaactacctgtatcactgtttgctcacctaatttatatacaggtagttccattttnnncccccccnncccccttttttttttttttttttttttttattaaatggtattgcttttgtttgcaggtctttttgtttttgttttgtttttgaggctgactgactgtcctanttgttgtgtgtttgtaatttttccacatcttattttgagcagctttgggtggtaaagttattgtttacaaattgaagcaactgattctagtggaacaaatgaaaaagaaacagtcaagcacacaatagtgcaaagaacgttcctttgtagatccgcaacttaaggattttgttcctcataaatggcatagttgaaagagcttatacactgcttacccagccaaatgctttgctttgaagtattgggttctgtgaaaatattgagcattgtacttaccttatctaggctgtgaaactgtcctacataccagagaatcataaaaacaaaaacctcactggcagcaagctgccgaataacaacagagtctagaggacatatttgtgggctgcacagatattttaggaatttcagaaattagaacaggagccaaaatgatttacattggcgttggcactgattcctttaaatggtctgggaaagggggttgggaagaggatggagctcaactggccagaagaggagcagctgcagtcctgatagcttctctagcctcggtcttttgagtgataagtagtcatgttgttttcatccagttggtttcttgtcattcccaagaagaatctcccaggccacatctttggggataactgacatactggattagccttttcaaaagaaaagtcatcctatttggttttatggggtgtgagttttgtgtgtacacacacagaaacatgtaaggtggtttgggtcatgtttttaaccacctggcaatacagtccactttctggtttcttttattgtgggaagtaaatggtcaagctgctcaggcagtgaaaagatgtggagaatgtccgttgtcattcttgccactgtattccatttgctaccgagatataacattaaggtggacacattttctaactgtattaattaaaagtcaatggatacagagagtggattttctccccaagtcccatccctgctgaagaccgcttggatgaactccccaacccactgtgcccctcccgcaacactaccagtagactttagaaccatagttaactaagtcttttacctctgagatacttaattctgggaaaattggtgacaattttcaacttctaaataggtaactcgactgcaaaataatcaaaactgataacaatgaaactgcggctcttaaacaaagccatgcatgccgtgcatttgtattgaaatgtctccatgatatgaagccaaatattcaatgtaacatacttaatatccaaaggtggaaacaaaagaatgtagagatccagtgttaagagttccatttgcttcaattaattatttaccttcctgtggaataatatatatatatntntttaatagaaccatagatagactagtagaatttagattataaatgtgtgagtgcagattatcctgctattgcacaagctagaggggggaaaaatctcaattccagctggcaagatgctagccaggacacatataagaaagttgcactagattgaatggtcacagaatcggaggacatggaagaaaaaggaaacttcggtggttctgcagcagacatgggctaggtcatatgtggtttctatgagttcgtgtctcaaaaaaaaaangagggggggcatctgtccccggtggagctcacctatttggaatatggggcatttgttttttccactgcaatgatttcagtctggtttcatcatgttggaattcgatcacaccattttcaaacaatgttaacatagtccagcttttgtttttctcatctcttctgagaggagactcactgtttctgtctgaggaagctcataccctcgggcaaaacatcaggacaaataaagagaaatgggggtaccgcattcccaacagaagcagtgtgttatttgttttaaaactctgaacagagatcttggaaatctttcaaaaagaccattgaattcttcattggctgagaacgacgttttaaaatgtcttaaataaggctttgtttgcattgtttgagttcaaggggccttattattgaatggaattgcacaagcctttctttgtgcaatcaaaccattgttattggtagttctgtaaaggaaactgtggaatcgaattggcagtggagtcataaatctatttactgagtgtggcttccaagaaatgttgcaattcaaaatgcactaagtctgtgatttattggagatttggagattctaaataatatttttaaaaaacttccatgcaacttctggtttaatgtttggcaactccacatgataaaaaaataaaaacagcccaaccgagtttcggaattaagtattcttctagtaagtgattcaaacttgtaatatttgccacaggactgacttatttatttactagctagaagctcttaagttcacttgtttatcagggcatatacagaagggtttgttaaaactcgatgttaactttacaactttctgacctggtgcatgaattctcaagtactgtatttcactgtgttggtgtgtctgatggaaatttcgaggtggtcccacaaaaatattttatgtagtgtgccttcaaagagaaccatttatttctcttcacttatcgtcccacaaagtcacatttggtggtggtcagccaagtcgcatctggtctagttttactcttgtcccaattttaaagagaaatgggaatgagtttgccctggtgagacccatacccattgcaatgatancttgagcacttaaagtccagtgttggctgttagtgtatttgatattctgcctgtctcctcatggttgaaatatgtctgaagaatagcagcataatctcttggctgtttatacttttttaaactttcctgtgttgtaaatattgtatacttttggtgattccagctatgtaacctctatgctctgtaaggtgattatttgtatatagcaacatggcccagtgatattatatagtttcccaatggagaggttattgagtaacctttgcattagtttaaacactaccagaagaatgctgagccaactataaacactcaattttgtatgttttccaaattgtacttattactgcttttgatactgtattacgtgccaatagtttcccaatcacatagcaggcaagagatattttgtactttttgatccactgtaatatttaataaaaacggcttggactttccaaccctgacagacccgcaagacaaaacaactggttcttgccagcctctagagaaatcccagaacactcagccctgacacgttaataccctgcacagatcagaggctgctggccacacagactcaccaagccacagacttgtcttccacaagcacgttcttaccttagccacgaagtgaccaagccacacgtactaaaggttgaactcaaagatatgtacagggtattaaactaat

SEQ ID NO: 768 - DNA, 2204 bp, Homo sapiens
  misc_feature: Incyte ID No: 1695746CB1
ggctgcaggcacgggcacgggcacggggcggggtgcttagggtgcaggaggcgcgcgcctagcggcggagtgtggcgtgaggccgggcccgcgccgccatgaacctagagcggctgcggaagcgcgtccggcagtacctcgaccagcaacagtatcaaagtgctctattttgggcagataaagtagcttcactctctcgtgaagaaccccaggacatctattggttggctcagtgtctttacctgacagcacaatatcacagagccgcccatgcacttcggtcacgaaaactggacaaattgtatgaagcatgtcgttaccttgcagctaggtgccattatgctgcaaaagagcaccagcaggcccttgatgttcttgacatggaagagcccatcaataaaagattatttgaaaaatacttgaaggacgaaagtggcttcaaagatccttccagcgactgggaaatgtcacagtcttcaataaagagttctatctgtcttctacgcgggaaaatctatgatgctctagataaccgaaccctggctacctacagctacaaagaagctttgaagcttgatgtctactgttttgaagcgttcgatcttttaacatcacatcacatgctgacagcacaagaagaaaaagaacttcttgaatcactaccccttagcaagctgtgtaatgaagaacaggaattgctgcgttttctatttgagaacaaattgaaaaaatataataagcctagtgaaacggtcatccctgaatctgtagatggcttgcaagagaatctggatgtggtagtgtctttagctgagagacattattataactgtgattttaaaatgtgctacaagcttacttctgtagtaatggagaaagatcctttccatgcaagttgtttacctgtacatatagggacgcttgtagagctgaataaagccaatgaacttttctatctttctcataaactggtggatttatatcctagtaatcctgtgtcttggtttgcagtgggatgttactatctcatggtcggtcataaaaatgaacatgccagaagatatctcagcaaagccacaacacttgagaaaacctatggacctgcatggatagcctatggacattcatttgcggtggagagtgagcacgaccaagcgatggctgcttacttcacagcagcacagctgatgaaagggtgtcatttgcctatgctgtatattggattagaatatggtttgaccaataactcaaaactagctgaaaggttcttcagccaagctctgagcattgcaccggaagacccttttgttatgcatgaggtcggcgtggttgcatttcagaatggagaatggaaaacagccgaaaaatggtttcttgatgctttggaaaaaattaaagcaattgggaacgaggtaacagttgacaaatgggaacctttgttgaacaacttggggcatgtctgcagaaaacttaaaaagtatgctgaggccttggattaccaccgtcaggcactggtgttgattcctcagaacgcatccacctactctgctattggatatatccacagtctgatgggcaactttgaaaatgctgtggactacttccacacagcccttggtcttaggcgagatgatacattttctgttacaatgcttggtcattgcatcgaaatgtacattggtgattctgaagcttatatcggagcagacattaaagacaaattaaaatgttatgactttgatgtgcatacaatgaagacactaaaaaacattatttcacctccgtgggatttcagggaatttgaagtagaaaaacagactgcagaagaaacggggcttacgccattggaaacctcaaggaaaactccagattccagaccttccttggaagaaacctttgaaattgaaatgaatgaaagtgacatgatgttagagacatctatgtcagaccacagcacgtgactccagtcagtggtcctggtcccactgtcccagtgtaggttagtattccttcacatcctctccatggcttaagaatgtcccacttcctaacgtgactccaaactgcatctctacatttaggaacagagacccgccttaagagactggatcgcacacctttgcaacagatgtgttctgattctctgaacctacaaaatagttatacatagtggaataaagaaggtaaaccatcaaaaaaaaaaa

SEQ ID NO: 769 - DNA, 3810 bp, Homo sapiens
  misc_feature: Incyte ID No: 1383494.2
  unsure 90: a, t, c, g, or other
gttcgccgccgccgcgccggccacctggagtttcttcagactccagatttccctgtcaaccacgaggagtccagagaggaaacgcggagngaggacaacagtacctgacgcctctttcagcccgggatcgccccagcagggatgggcgacaagatctggctgcccttccccgtgctccttctggccgctctgcctccggtgctgctgcctggggcggccggcttcacaccttccctcgatagcgacttcacctttacccttcccgccggccagaaggagtgcttctaccagcccatgcccctgaaggcctcgctggagatcgagtaccaagttttagatggagcaggattagatattgatttccatcttgcctctccagaaggcaaaaccttagtttttgaacaaagaaaatcagatggagttcacactgtagagactgaagttggtgattacatgttctgctttgacaatacattcagcaccatttctgagaaggtgattttctttgaattaatcctggataatatgggagaacaggcacaagaacaagaagattggaagaaatatattactggcacagatatattggatatgaaactggaagacatcctggaatccatcaacagcatcaagtccagactaagcaaaagtgggcacatacaaattctgcttagagcatttgaagctcgtgatcgaaacatacaagaaagcaactttgatagagtcaatttctggtctatggttaatttagtggtcatggtggtggtgtcagccattcaagtttatatgctgaagagtctgtttgaagataagaggaaaagtagaacttaaaactccaaactagagtacgtaacattgaaaaatgaggcataaaaatgcaataaactgttacagtcaagaccattaatggtcttctccaaaatattttgagatataaaagtaggaaacaggtataattttaatgtgaaaattaagtcttcactttctgtgcaagtaatcctgctgatccagttgtacttaagtgtgtaacaggaatattttgcagaatataggtttaactgaatgaagccatattaataactgcattttcctaactttgaaaaattttgcaaatgtcttaggtgatttaaataaatgagtattgggcctaattgcaacaccagtctgtttttaacaggttctattacccagaacttttttgtaaatgcggcagttacaaattaactgtggaagttttcagttttaagttataaatcacctgagaattacctaatgatggattgaataaatctttagactacaaaagcccaacttttctctatttacatatgcatctctcctataatgtaaatagaataatagctttgaaatacaattaggtttttgagatttttataaccaaatacatttcagtgtaacatattagcagaaagcattagtctttgtactttgcttacattcccaaaagctgacattttcacgattcttaaaaacacaaagttacacttactaaaattaggacatgttttctctttgaaatgaagaatatagtttaaaagcttcctcctccatagggacacattttctctaacccttaactaaagtgtaggattttaaaattaaatgtgaggtaaaataagtttatttttaatagtatctgtcaagttaatatctgtcaacagttaataatcatgttatgttaattttaacatgattgctgacttggataattcattattaccagcagttatgaaggaaatattgctaaaatgatctgggcctaccataaataaatatctccttttctgagctctaagaattatcagaaacaggaaagaatttagaaaaacttgagaaaacctaatccaaaataaaattcacttaagtagaactataaataaatatctagaatctgactggctcatcatgacatcctactcataacataaatcaaaggagatgattaatttccagttagctggaagaaactttggctgtaggtttttattttctacaagaattctggtttgaattatttttgtaagcaggtacattttataaaatgtaagccctactgtaaggtttagcactgggtgtacatatttattaaaaatttttattataacaacttttattaaaatggcctttctgaacactttatttattgatgttgaagtaaggattagaaacatagactcccaagttttaaacacctaaatgtgaataacccatatatacaacaaagtttctgccatctagctttttgaagtctatgggggtcttactcaagtactagtaatttaacttcatcatgaatgaactataatttttaagttatgcccatttataacgttgtttatgactacattgtgagttagaaacaaacttaaaatttggggtatagaacccctcaacaggttagtaatgctggaattcttgatgagcaataatgataaccagagagtgatttcatttacactcatagtagtataaaaagagatacatttccctcttaggcccctgggagaagagcagcttagatttccctactggcaaggtttttaaaaatgaggtaaatgccgtatatgatcaattaccttaattggccaagaaaatgcttcaggtgtctaggggtatcctctgcaacacttgcagaacaaaggtcaataagatccttgcctatgaatacccctcccttttgcgctgttaaatttgcaatgagaagcaaatttacagtaccataactaataaagcagggtacagatataaactactgcatcttttctataaaactgtgattaagaattctacctctcctgtatggctgttactgtactgtactctctgactccttacctaacaatgaatttgttacataatcttctacatgtatgatttgtgccactgatcttaaacctatgattcagtaacttcttaccatataaaaacgataattgctttatttggaaaagaatttaggaatactaaggacaattatttttatagacaaagtaaaaagacagatatttaagaggcataaccaaaaaagcaaaacttgtaaacagagtaaaaatctttaatatttctaaagacatactgtttatctgcttcatatgctttttttaatttcactattccatttctaaattaaagttatgctaaattgagtaagctgtttatcacttaacagctcattttgtctttttcaatatacaaattttaaaaatactacaatatttaactaaggcccaaccgatttccataatgtagcagttaccgtgttcacctcacactaaggcctagagtttgctctgatatgcatttggatgattaatgttatgctgttctttcatgtgaatgtcaagacatggagggtgtttgtaattttatggtaaaattaatccttcttacacataatggtgtcttaaaattgacaaaaaatgagcacttacaattgtatgtctcctcaaatgaaaattctttatctgaaattttaaaagacattgattccgcatgtaaggatttttcatctgaagtacaataatgcacaatcagtgttgctcaaactgctttatacttataaacagccatcttaaataagcaacgtattgtgagtactgatatgtatataataaaaattatcaaagaaaattacctgccagtcatttgtaaatgctgtctactcctgaaagccttccttcatctctatttagttaataatgtgctctctcctcctgttttgaaaccccatagctctctacacctcttattgtacatcactctactttgcattggagttctgtttctata

SEQ ID NO: 770 - DNA, 3660 bp, Homo sapiens
  misc_feature: Incyte ID No: 1040594.3
acgaagctctgtggcgagtggcacaggcagggccccttcctttcctagttgggttctgacagctccgaggcagtggtttacacaaccaacacgaaacatttctacgatccacccgattcctcccctcattgatattcaggaagcagctctccttcccctgccttcagctcaagtttgctgagcttttgtttcatttgtgaatacttcttgctggaagtccctcacccagagaccagtgctcccaacggcagagcagcgggggagataaagaactggtgacacgtggctgtacattcagcacagctgtggtgtccccaagtgccatgacccaggagccattcagagaggagctggcctatgaccggatgcccacgctggagcggggccggcaagaccccgccagctatgccccagacgcgaagccgagcgacctgcagctgtcgaagagactgcccccctgcttcagccacaagacgtgggtcttctctgtgctgatggggagctgcctcctggtgacctcggggttttcgctgtacctggggaacgtgttcccggctgagatggattacttgcgctgtgctgcaggctcttgcatcccctcggcaattgtgagcttcaccgtctccaggaggaacgccaatgtgattcccaactttcagatattgtttgtttccacgtttgctgtgaccactacgtgtttaatttggtttggatgcaaactagtcctgaacccatcagcaataaacatcaacttcaacctcatcctgctgctcctgctggagctgctcatggcggccacggtgatcatcgctgcacggtccagcgaggaggacttcaagaaaaagaagggctccatgtctgacagcgccaacattctggacgaagtgccatttcctgctcgggtcctgaaatcttattcggtcgtcgaggtaatcgcaggcatctctgccgtcctcggggggatcattgccctgaacgtggatgactcagtttcaggcccacacctctcagtgacgttcttttggatcctagtggcctgctttccaagtgccattgccagtcatgtggcagcagagtgtcccagcaagtgtctggtggaggtcctgattgccataagcagcctcacgtctccgctgctgttcacagcctctggatatctgtcattcagcatcatgagaatcgtggagatgtttaaggattacccgccagccataaaaccatcctacgatgtgctgctgctgctgctgctgctagtgctcctgctgcaggccggcctcaacacgggcaccgccatccagtgcgtgcgcttcaaggtcagtgcaaggctgcagggtgcatcctgggacacccagaacggcccgcaggagcgcctggctggggaggtggccaggagccccctgaaggagttcgacaaggagaaagcctggagagccgtcgtggtgcaaatggcccagtgacccccagacgcggaaaccgggtggcagcgcccagcctggccccaagcatggaaacgcacaacccctaatcgccctgagctactgcttctaacacctcttttcccttgtgtgagggcaaaccaggctgcaggtggggttttcacttcctagggtagtttaattttaaaataggccaatgttggctagtctgtgcctcagtgagatcagtcagctccgagtggctcccgtgtcgtaacagcaggagcatggccgcaacttcccaggccgaggaagggcccccggctcggcctcttgagagccccacccctgaactggccccagctcctcttcctgcctctctcatggcttgggctggagtgggctctctggacctgaccagactgtgggtccctgcgtctcctgcccactctgaccgggcttcctccctccacgcttagggtctgtcccgggtactcagtcagcccagtgggatcttacccacttccctgcaaggtgcacctgccccaggctcaggctgcccagcggctcttcctggacagtgagagcagggctgggcgcctctgtcctggcccgggagccgcaggggcccctcctccagagcctgggcgcaagcgacacaggctgccgctgctctcccaggtgaaatccacaccagtccacgccgggtcgcctgccctgtctccctacttagacccagtcattctagagggatccaccgccacactggccggcccacgtcctgggtgctgtcatgcccagcttggagtgccacgtggccgctgcccacgtcccgggcactgtcatgcccagcttggagtgccacatggccgctgcccacgtcccgggcactgtcatgcccagcttggagtgccacgtggccgctgctgtgacaggcagtgttcttgggggtggggctgcatccaaggctttgtaaaccggctggaccacgtctccctggccccagtgaccgggggaagctgagcccctccctcctgtgtttgctcccattactcaaaatgcaggacagatcaggtcagagcccaggaattctcacaggttcacccagcgccctctacctcctagcaagtactttgtcttgatcctcactgagaaggccccaggggcagcggtcttctccatctccgctgttttggggtcttagggtacagcccaggcggtcactgcccacctgccaggctgcagggacagttgggtgtgagaataacactggctttgggtagtgccatggccaggagtgggtttccctgcgtctcctcgtcccgagggcgcctgggtcctcccagctgacggcagtaaatccacagtgagttggggcgactgtgaaactggaatgctgttactttgataattactttccagcaggtgttttccttcacaatggttttgtttctttccttctgatctgagaagacatgaacgttttctcttcaccgccgtggggtgtattgactggtcccccatgggctgctggaaaggcccggagatgcatctgtggcctggggccatcaagatcaaagaaccaggaggcctgggagatgcagctggatggggcggcctgcagaccctgccagggggtttgaggaccctcccaggtttcccactgcggaacaggagtgactctggctgccaagataccttcatggtgttcatgacaagtggaatcattattttcaaccattgaagggggatgcaggcaagacaccttcccagctgctcctagaggggacaagccaggccctctctgcagtcctcggcagctccggaaggacacagtcaggggccgggcaaacactttggccacagccccaaacaagcgccaccgtgggagaggagaggctgctgtcactggtaccggatgcagaccccaccctgtctgcaggccacccccacctccctgcagctttgaggctggcggggtctgctcctgggaatggggtgggagccacagggacgacccgggggcgggctgatgtcttcttgggggcagaccagagagctcaagtttcagagtcagaattaggcacttggagcgtttttgctggcttgcactttcttattttcttattttagagcgcttaaaaaatccggaaaaatggggtttaaaagaactgtctctttcagtctacatttttgtttaatacgcttgagcaataaacgctgacttgcaaaaaaaaaaaaaagg

SEQ ID NO: 771 - DNA, 1045 bp, Homo sapiens
  misc_feature: Incyte ID No: 2189816CB1
gagcacggagattcggcacgaggaggaaaagcagcaaaccagatggagaaggaaggccaaaaagataagtagaaagctggaccatgagctccttgagggcagggactgaatggttactatgtccccagggcccagcatgaccttctcctggattcctcatcttccttctgtgacctgtgtctccatcagtttctcctccggcatctttttcttacaggattcttacctcaggaatagatggacatggcctggcagatgatgcagctgctgcttctggctttggtgactgctgcggggagtgcccagcccaggagtgcgcgggccaggacggacctgctcaatgtctgcatgaacgccaagcaccacaagacacagcccagccccgaggacgagctgtatggccagtgcagtccctggaagaagaatgcctgctgcacggccagcaccagccaggagctgcacaaggacacctcccgcctgtacaactttaactgggatcactgtggtaagatggaacccacctgcaagcgccactttatccaggacagctgtctctatgagtgctcacccaacctggggccctggatccggcaggtcaaccagagctggcgcaaagagcgcattctgaacgtgcccctgtgcaaagaggactgtgagcgctggtgggaggactgtcgcacctcctacacctgcaaaagcaactggcacaaaggctggaattggacctcagggattaatgagtgtccggccggggccctctgcagcacctttgagtcctacttccccactccagccgccctttgtgaaggcctctggagccactccttcaaggtcagcaactatagtcgagggagcggccgctgcatccagatgtggtttgactcagcccagggcaaccccaatgaggaggtggccaagttctatgctgcggccatgaatgctggggccccgtctcgtgggattattgattcctgatccaagaagggtcctctggggttcttccaacaacctattctaatagacaaatccacatgaaaaaaaaaaa

SEQ ID NO: 772 - DNA, 441 bp, Homo sapiens
  misc_feature: Incyte ID No: 1089172.8
gatcaccaagggagtgaatgtagttggaaaatagtttcctccaatattcagaatttgaggaaactaggaaaagcagcaaaccagatggagaaggaaggccaaaaagataagtagaaagctggggcccagcatgaccttctcctggattcctcatcttccttctgtgacctgtgtctccatcagtttctcctccggcatctttttcttacaggattcttacctcaggaatagatggacatggcctggcagatgatgcagctgctgcttctggcttggtgactgctgcggggagtgcccagcccaggacgtgcgcgggccaaggacggacctgctcaatgtctgcatgaacgccaagcaccacaagacacagcccagccccgaggacgaagctgtatggccagtgcagtccctggaaggagaatgcctgctgcacggccagca

SEQ ID NO: 773 - DNA, 4606 bp, Homo sapiens
  misc_feature: Incyte ID No: 474928.4
gtgttttctttcagtatggtccctattctgatgtctcagaaattaccactgctgcagggcctcctggacaatgcaaagcaccttgtatttcttgtacacctgatggatgtgtcttagtgggttgggagagtcctgatagttctggtgctgacatctcagagtacaggttggaatggggagaagatgaagaatccttagaactcatttatcatgggacagacacccgttttgaaataagagacctgttgcctgctgcacagtattgctgtagactacaggccttcaatcaagcaggggcagggccgtacagtgaacttgtcctttgccagacgccagcgtctgcccctgaccccgtctccactctctgtgtcctggaggaggagccccttgatgcctaccctgattcaccttctgcgtgccttgtactgaactgggaagagccgtgcaataacggatctgaaatccttgcttacaccattgatctaggagacactagcattaccgtgggcaacaccaccatgcatgttatgaaagatctccttccagaaaccacctaccggatcagaattcaggctataaatgaaattggagctggaccatttagtcagttcattaaagcaaaaactcggccattaccacccttgcctcctaggctagaatgtgctgctgctggtcctcagagcctgaagctaaaatggggagacagtaactccaagacacatgctgctgaggacattgtgtacacactacagctggaggacagaaacaagaggtttatttcaatctacagaggacccagccacacctacaaggtccagagactgacggaattcacatgctactccttcagaatccaggcagcaagcgaggctggagaagggcccttctcagaaacctataccttcagcacaaccaaaagtgtcccccccaccatcaaagcacctcgagtaacacagttagaaggaaattcatgtgaaattttatgggagacggtaccatcaatgaaaggtgaccctgttaactacattctgcaggtattggttggaagagaatctgagtacaaacaggtgtacaagggagaagaagccacattccaaatctcaggcctccagaccaacacagactacaggttccgcgtatgtgcgtgtcgtcgctgtttagacacctctcaggagctaagcggagccttcagcccctctgcggcttttgtattacaacgaagtgaggtcatgcttacaggggacatggggagcttagatgatcccaaaatgaagagcatgatgcctactgatgaacagtttgcagccatcattgtgcttggctttgcaactttgtccattttatttgcctttatattacagtacttcttaatgaagtaaacccaacaaaactagaggtatgaattaatgctacacattttaatacacacatttattcagatactcccctttttaaagcccttttgttttttgatttatatactctgttttacagatttagctagaaaaaaaatgtcagtgttttggtgcacctttttgaaatgcaaaactaggaaaaggttaaactggattttttttttttaagaaaaaaaggaacaaaaaagaagaaaagtataccagataccaaaagctagctttcttatgttttcctttaaattttcagatttaccttcattctgttttcactgatgtcttttgcaagcctttgattttttttttttgttacagtttagtaatttatattcaccagtcacttcttatgtcttgaacatctgtatctgtaaacatgaatcaccgtgtgtgtacttacagggctaggatttcagtgttgtcagagtattaccacacagcaacagcaacatacagaagatatgttcactcagataagactgccctaaacaaccattttgtcactcagttatttaactgtgtttagctcatttaaatcaaaatgtgtactttaatctaaaatgttttaataatctgtatttcttataattttaacactatgagctgcctatataagaaatcaagtaaccagaatgcacctataaattatggagcattgtagattttaccacatcaattcatagcagtaactttaagagggcattgtgcaatagttagttgttttcttgttcagctattttaaaggctgctttaacttgtttgtttgtctttgtatataactacttctaatctaatcactagagttattatattctgttatgtttgaccagaattatatgacaagaactggtgacagtttagtgcctctgcccattgtccatgatttacactaattgtgagcagtcttcttatgtgtcagctcattatttttgaaacatttgcctttaggctgttctttgaggtatcaatgaagtgattgaatttcaataccttaattcagtgcacataatactaatgtaacagcagatgaaaattgataaaacccaaaagagagtcatctaaatttgtagttcctatttctgtgggtttgcctggccatggttggagagggaatggtgtttgatggtaaacacagggtgtttggggatcaaggagcctagattctctccctggatctgtcactaacttgctgcgtgacctgaacacgtcactttacctctctgtgcctcagttttcccatgcatgaaaaataaaataaaataaaacggggattctaatgtttgtaagtgctttgagatctttgaccaacaggtgctattggagtgcaaagtgttactcttacgtgtttattttgagtcatgagataatcaattttaacccaaagtcattggattatttatatgaagtccataatgttcgagtacctcagggacatttaagagttggaggtgcaaatatattccaaaagggtgcaacagacacagtgtatccccctgcttctgtttttgtatatttttgctacttggtttttcttgatcatagctattttgtgcttgatctttattgtctaagatgcagtatcctgtactagcttataatattcccataccaaagtcatggggaaacaaacattattttgtttttggtttatttatactatattctgcatacagtactttaaatgccaattacagtgcaatctttatttattgtaaaattttttaagtgtacttatgtactaattttcccttgtagcatgttatatttttgtgttttatacttttgtaattttaggtcagtcttgttccttggcaacatctgtagtattattaatcttctgacattttcttatgtttttaaaaagataagagcatctagtgcattaaatgccaaaaaaaaaatacattatcagtgattgaaacgtttacatgtacccaaaaaccataatcatctcttggaagaaaatgctgagatcaatgaattattctgtgtgcctatattgacgtagtgagtactagagagttctgtattttattattgactataataattagtttaattagctttgcaaactgatggcatcaaggtaaatatatttttgccaaagttctggccttccaaaactcacccccttatttaaatgtgtgctatgacccactatgaccacagcatctgcattttctaaaaaattccatgcaggtgttttggggagaggtattttttaagcaatgaaaattcaactgagtacaaagccccctcttggggggttggggaagtctcttttttgaaacacttcagaactgctgctataaagaaattctctaattggttgaatttttttttaagtaaatagtactttaggccaaaatttatatgaatatttgatcttcttgagattttcatactatcatttaaccaccaggaagctgaagtgtgtgaagtacaaagctgacagcactttattttattgctctccattatttggtattcattatattccttcagtcagaaaattattactctctatggcactgttttttatcacaaatatgtatatgtgatattgatatataactatatatattgccatcacacacgaacaataaaataaagtgttctattaacctgatctctttgcccttttgctatgtgaggagtgaatgagtggccttctgatgctctgactcttctctgtatgtcaaactcatccctggcacaagaaattccagtcatgtgaagcaaactgccctttgtcctcaaagaaattgttgaaaaagaaaactttttaaagagattttttgcatattctctgccttgttcttatcaacttgaaatgttggcattttctaaccttgttttgttggctacaataattcagtattcatgtcaaaattgagaagtgccctaattgaatgtgtttgaatgttatccttgcacaattctttaaattgaaagataaaatgttttacctcactgttggacatacattccaagcttttcaactctaggagaaaaagaaaatcatgttttcctgtattgtaaattttagactatttcatatacattgtattaaaactgccatatcaattttaatgtatagattttgcaaatattatgctatatgtaatacctaactgtatctgtagtgtatatgtaatatatttatgcccaataaatgttttaattctttctgactt

SEQ ID NO: 774 - DNA, 3310 bp, Homo sapiens
  misc_feature: Incyte ID No: 116944.1
cggaacatggactctgactcttgcgccgccgccttccacccggaggaatactcccccagttgcaagaggcgcaggaccgtggaagacttcaacaaattctgcacctttgtcttggcctatgctggctacatcccttatccgaaggaggaactccctttaaggagcagccccagccctgctaacagcactgctggtaccattgacagcgacggctgggacgcgggtttctcagacatcgcgtcctcagtgcccttgccagtctctgaccgctgctttagccacctgcagcctactctcttgcagcgagccaagcccagtaacttcctgctggacagaaagaaaacgtgacaagctgaagaatgagagaagaagaggaagcgcagggacagtgatgcgcctgggaaagaggggtacagggggggcttgctgaagctggaagccgctgacccctacgtggagacccccacgagtcccaccttgcaggatatcccccaggctcccagcgacccctgctcgggctgggactccgatactccctcgagtggatcttgtgccactgtgtcacctgatcaggtcaaagaaataaaaactgaaggcaaacggactatcgtccggcagggaaagcaggtggtgttccgagatgaggacagcactggcaatgatgaggacatcatggtggactcagatgacgattcctgggacctcgtgacctgcttctgcatgaagccatttgccggccgccccatgatcgagtgtaatgagtgccacacctggattcacctgtcctgtgcgaaaatccggaaatccaatgttccagaagtgtttgtctgccaaaagtgccgggactccaagtttgacatccgccgttccaaccgctcgcggacgggctcccggaagctgttcctggactgactgctggctggcgaggaggctgcgagcgtggaactcggaagcgaccgtgggcttttttgcccttctcttagttgagcacagaaccctcagctctggtgcgggcagatccctgccatttaggtgcctaagcaaaaggacaggctgtccaaggtagaaactgtacatagccggtgaccgaatgcgacctttgccagccagagctgctgccagagctgcgttccctgcagtggaggtggactggacacccacgtgcagcgggtttggctcatttgaaaatgagggtccgtggtagctgtgcgttttgctatcattgctaagagattcccgctgattgggctcagtgccagctgttattctgcttccactgtgttggggagaggtgttcggtttccccagcctgttaatgaacagccatacgtgtaagctttttcttgagtgttaagtcttttaccaaaagtgtctgtacagcagccatccaagttgcccctacttagtggcttgccctctgcctgcctcagctgctgcctgaccggctgggggaggcactggcgggaggcctcgggctcccctggaagggcgctgggctggcgggtcagctggtggttcttaggtttccttctgtttgttaaaagggacaatgtggccacttctctgtggaaagggagttggttggggggttgagatggcccgtgttcataactcagtttcctgttttgcacgatgtaaaaaccctgtctttttgcacgatacagccaaaagtattggctgatttcttgctgagtgccctcttagttggtgtgtgaggtcttggtgggctcaggccagctgtttgcgagtgtgggaactcataggttctgtctttgtctcttcctttcacctcattctggtagcagcataaaggttaggcaatcactgggacccgcatggtgttcctccaaagaatagggtaaaggagagctgggagggagccctctccgttgggtgactcttgtgtgccctttagacaggctggcctgccggttccacagggtacagttaggacttgagtctttctttttctgttttgagttggtgagtgagtgatagggtaacatgggccttcaggatgaccccttggaactgtgccgagttccttaaatctcagctgggatcctggacctgggaggcccctgtgagggccagctctggaaaaacctgggagttgatgccggaggctgtggaagaactctgctcgagggcagggtgccctggaacactggtagttctggggctgggagggagaggggctccggctttctctgaaatgaacactgctcttcagcagttcaagtacttgttctcaaaacattttctaattgattggtaggttttcataagcattgtttctttaaggcatggaaagggaagaatgctcaagcaagtcatgtttgttttcagtgggatgggcccgcgttctcactgctgggggcttccccttcatgtggcacctttgtgccaggccaccaggcagactcttcccaccttctcccactgaagcaccaaggggcttgaaccgtaatttggctaatcagaggcattttttttgtcctagtatctttcacacttgtccaaccgtcttatttttttaaaagttctgttgcttgtattaacacgaaactagagagaaatagtttctgaagccagtttattgtgaagatccccaagggggaggttcggtagagaaaaatagtaagctggtttagaaactgacgagggcaaacagccaggacgcattggagaggaatttgccaaagatctaccctgagataacgcctgtccagtgtcttcaccacgtgaataaccagcgctccaaagtgtttttctgctttgaaaaaaaaaattccacaagcttttaaaggtgcatttaagaatccatgtgactttagaatggaactgccggccctggcaactgtcacgtgtgctagaaggttcgatgcctctggaatgcatgtgatactcatctccattttgtttccttgattgcatttttgttcttttagcagatctgtccctgtgggtggtgtctaagaagtcggacaccttggtttttgtgttagattgagctgggcagctgcaatcagcttctttatatgcaaattaggcacgacccatctgtggttcctggttggtggctaatgaagtgaggggagggagggatgtcaccccaaaagtaggccctcccattggctttggccaggccagacacttcacatcgtttacatggttctgtgtaattttaaagtttatgtgtataaagcgaagctgtttctgtgaaactgtatattttgtaaataaatatattgctactttgaggttcatgattcaaggttcaggcgattgcgttctgtgctgaaggaaa

SEQ ID NO: 775 - DNA, 2617 bp, Homo sapiens
  misc_feature: Incyte ID No: 253550.17
gcgagcactgcggctgggcgctgaggatcagccgcttcctgcctggattccacagcttcgcgccgtgtactgtcgccccatccctgcgcgcccagcctgccaaggcagcgtgccccggttgcaggcgtcatgcagcgggcgcgacccacgctctgggccgctgcgctgactctgctggtgctgctccgcgggccgccggtggcgcgggctggcgcgagctcggggggcttgggtcccgtggtgcgctgcgagccgtgcgacgcgcgtgcactggcccagtgcgcgcctccgcccgccgtgtgcgcggagctggtgcgcgagccgggctgcggctgctgcctgacgtgcgcactgagcgagggccagccgtgcggcatctacaccgagcgctgtggctccggccttcgctgccagccgtcgcccgacgaggcgcgaccgctgcaggcgctgctggacggccgcgggctctgcgtcaacgctagtgccgtcagccgcctgcgcgcctacctgctgccagcgccgccagctccaggaaatgctagtgagtcggaggaagaccgcagcgccggcagtgtggagagcccgtccgtctccagcacgcaccgggtgtctgatcccaagttccaccccctccattcaaagataatcatcatcaagaaagggcatgctaaagacagccagcgctacaaagttgactacgagtctcagagcacagatacccagaacttctcctccgagtccaagcgggagacagaatatggtccctgccgtagagaaatggaagacacactgaatcacctgaagttcctcaatgtgctgagtcccaggggtgtacacattcccaactgtgacaagaagggattttataagaaaaagcagtgtcgcccttccaaaggcaggaagcggggcttctgctggtgtgtggataagtatgggcagcctctcccaggctacaccaccaaggggaaggaggacgtgcactgctacagcatgcagagcaagtagacgcctgccgcaaggttaatgtggagctcaaatatgccttattttgcacaaaagactgccaaggacatgaccagcagctggctacagcctcgatttatatttctgtttgtggtgaactgattttttttaaaccaaagtttagaaagaggtttttgaaatgcctatggtttctttgaatggtaaacttgagcatcttttcactttccagtagtcagcaaagagcagtttgaattttcttgtcgcttcctatcaaaatattcagagactcgagcacagcacccagacttcatgcgcccgtggaatgctcaccacatgttggtcgaagcggccgaccactgactttgtgacttaggcggctgtgttgcctatgtagagaacacgcttcacccccactccccgtacagtgcgcacaggctttatcgagaataggaaaacctttaaaccccggtcatccggacatcccaacgcatgctcctggagctcacagccttctgtggtgtcatttctgaaacaagggcgtggatccctcaaccaagaagaatgtttatgtcttcaagtgacctgtactgcttggggactattggagaaaataaggtggagtcctacttgtttaaaaaatatgtatctaagaatgttctagggcactctgggaacctataaaggcaggtatttcgggccctcctcttcaggaatcttcctgaagacatggcccagtcgaaggcccaggatggcttttgctgcggccccgtggggtaggagggacagagagacagggagagtcagcctccacattcagaggcatcacaagtaatggcacaattcttcggatgactgcagaaaatagtgttttgtagttcaacaactcaagacgaagcttatttctgaggataagctctttaaaggcaaagctttattttcatctctcatcttttgtcctccttagcacaatgtaaaaaagaatagtaatatcagaacaggaaggaggaatggcttgctggggagcccatccaggacactgggagcacatagagattcacccatgtttgttgaacttagagtcattctcatgcttttctttataattcacacatatatgcagagaagatatgttcttgttaacattgtatacaacatagccccaaatatagtaagatctatactagataatcctagatgaaatgttagagatgctatatgatacaactgtggccatgactgaggaaaggagctcacgcccagagactgggctgctctcccggaggccaaacccaagaaggtctggcaaagtcaggctcagggagactctgccctgctgcagacctcggtgtggacacacgctgcatagagctctccttgaaaacagaggggtctcaagacattctgcctacctattagcttttctttatttttttaactttttggggggaaaagtatttttgagaagtttgtcttgcaatgtatttataaatagtaaataaagtttttaccattaaaaaaatatctttccctttgttattgaccatctctgggctttgtatcactaattattttattttattatataataattattttattataataaaatcctgaaaggggaaaataaaaaaaa

SEQ ID NO: 776 - DNA, 1572 bp, Homo sapiens
  misc_feature: Incyte ID No: 941230CB1
ctggagagagtctgctctccgatgactttgcccactctcttcgcagtggggacaccggaccgagtgcacactggaggtcccagagcacgacgagcgcggaggaccgggaggctcccgggcttgcgtgggcatcacgtgccctccccccatgtccgtggaacacgcagacatctgggtcaagagctacagcttgtactccagggagcggtacatttgtaactctggtttcaagcgtaaagccggcacgtccagcctgacagagtgcgtgttgaacaaggccacgaatgtcgcccactggacaacccccagtctcaaatgcattagagaccctgccctggttcaccaaaggccagcgccaccctccacagtaacgacggcaggggtgaccccacagccagagagcctctccccttctggaaaagagcccgcagcttcatctcccagctcaaacaacacagcggccacaacagcagctattgtcccgggctcccagctgatgccttcaaaatcaccttccacaggaaccacagagataagcagtcatgagtcctcccacggcaccccctctcagacaacagccaagaactgggaactcacagcatccgcctcccaccagccgccaggtgtgtatccacagggccacagcgacaccactgtggctatctccacgtccactgtcctgctgtgtgggctgagcgctgtgtctctcctggcatgctacctcaagtcaaggcaaactcccccgctggccagcgttgaaatggaagccatggaggctctgccggtgacttgggggaccagcagcagagatgaagacttggaaaactgctctcaccacctatgaaactcggggaaaccagcccagctaagtccggagtgaaggagcctctctgctttagctaaagacgactgagaagaggtgcaaggaagcgggctccaggagcaagctcaccaggcctctcagaagtcccagcaggatctcacggactgccgggtcggcgcctcctgcgcgagggagcaggttctccgcattcccatgggcaccacctgcctgcctgtcgtgccttggacccagggcccagcttcccaggagagaccaaaggcttctgagcaggatttttatttcattacagtgtgagctgcctggaatacatgtggtaatgaaataaaaaccctgccccgaatcttccgtccctcatcctaacttgcagttcacagagaaaagtgacatacccaaagctctctgtcaattacaaggcttctcctggcgtgggagacgtctacagggaagacaccagcgtttgggcttctaaccaccctgtctccagctgctctgcacacatggacagggacctgggaaaggtgggagagatgctgagcccagcgaatcctctccattgaaggattcaggaagaagaaaactcaactcagtgccattttacgaatatatgcgtttatatttatacttccttgtctattatatctatacattatatattatttgtattttgacattgtaccttgtataaacaaaataaaacatctattttcaatatttttaaaaaaaaaaaa

SEQ ID NO: 777 - DNA, 2033 bp, Homo sapiens
  misc_feature: Incyte ID No: 2518547CB1
cggctcgaggccgcagccccatggacagtcttctgcacccccgggagcgccctggatccactgcctccgagagctcagcctctctgggcagtgagtgggacctctcagaatcttctctcagcaacctgagtcttcgccgttcctcagagcgcctcagtgacacccctggatccttccagtcaccttccctggaaattctgctgtccagctgctccctgtgccgtgcctgtgattcgctggtgtatgatgaggaaatcatggctggctgggcacctgatgactctaacctcaacacaacctgccccttctgcgcctgcccctttgtgcccctgctcagtgtccagacccttgattcccggcccagtgtccccagccccaaatctgctggtgccagtggcagcaaagatgctcctgtccctggtggtcctggccctgtgctcagtgaccgaaggctctgccttgctctggatgagcccagctctgcaacgggcacatggggggagcctcccggcgggttgagagtggggcatgggcatacctgagccccctggtgctgcgtaaggagctggagtcgctggtagagaacgagggcagtgaggtgctggcgttgcctgaactgccctctgcccaccccatcatcttctggaaccttttgtggtatttccaacggctacgcctgcccagtattctaccaggcctggtgctggcctcctgtgatgggccttcgcactcccaggccccatctccttggctaacccctgatccagcctctgttcaggtacggctgctgtgggatgtactgacccctgaccccaatagctgcccacctctctatgtgctctggagggtccacagccagatcccccagcgggtggtatggccaggccctgtacctgcatcccttagtttggcactgttggagtcagtgctgcgccatgttggactcaatgaagtgcacaaggctgtggggctcctgctggaaactctagggcccccacccactggcctgcacctgcagaggggaatctaccgtgagatattattcctgacaatggctgctctgggcaaggaccacgtggacatagtggccttcgataagaagtacaagtctgcctttaacaagctggccagcagcatgggcaaggaggagctgaggcaccggcgggcgcagatgcccactcccaaggccattgactgccgaaaatgttttggagcacctccagaatgctagagaccttaagcttccctctccagcctagggtggggaagtgaggaagaagggattctagagttaaactgcctccctgttgccttcatggagttgggaacaggctgggaaggatgcccagtcaaaggctccaagcgaggacaacaggaagagggatccactgttaccaaaagtcctgattcccccatcaccaacctacccagtttgttcgtgctgatgttgggggagatctggggggagttggtacagctctgttcttcccttgtcctataccgggaactcccctccagggtacccacagatctgcattgccctggtcattttagaagtttttgttttaaaaaacaactggaaagatgcagagctactgagcctttgccctgaatgggaggtagggatgtcattctccaccaataatggtccctcttccctgacgttgctgaaggagcccaaggctctccatgcctttctacctaagtgtttgtattttattttaaattatttattctggagccacagcccccttgcttatgaggttcttatggagagtgagaaagggaagggaaatagggcaccatggtccggtggtttgtagttccttcaaagtcaggcactgggagctagaggagtctcaagctccccttaggaagaactggtgccccctccagtcctaatttttcttgcctgccccgccttggggaatgcctcacccacccaggtcctgacctgtgcaataaggattgttccctgcgaagttttgttggatgtaaatatagtaaaagctgcttctgtctttttcaaaaaa

SEQ ID NO: 778 - DNA, 2114 bp, Homo sapiens
  misc_feature: Incyte ID No: 230726.24
  unsure 54: a, t, c, g, or other
cacttataagcagcgtaatgaggacttccggaaactgttcagcaaactccccgnaggcagaacgcctcattgtgggtgagtcccggacccccagtcccagctcctagcccagccctgcgactctccgccagcccgtgggcgccggctgagcctcgtgacttggtgtcctcctgtctctccccgcccctctcagattactcctgcgccctgcagcgtgagatcctgctccagggccgcctctacctctctgagaactggatctgcttctacagcaacatcttccgctgggagaccacgatctccatccagctgaaggaagtgacatgtctgaagaaggaaaagacggccaagctgatccccaacgccatccagatctgcacggagagcgagaagcatttcttcacttcctttggggcccgtgaccgctgcttcctcctcatcttccgcctctggcagaatgcactgcttgaaaaggacccccaaggaagtgggagatgtgatcgccctgagcgacatcacctcctcgggggcagctgaccgcagccaggagccaagcccagtgggttcgcgccgtggccatgtcacgcccaacctttcccgagccagcagcgacgcagaccatggggcagaggaggacaaggaggagcaggtagacagccagccagacgcctcctccagccagacagtgaccccggtggctgaacccccgagcacagagcccacccagcctgacgggcccaccaccctgggccccttggatctgctgcccagtgaggagctattgacagacacaagtaactcctcttcatccactggggaggaagacttggctgccctgcttcccgacctctccggccgcctcctcatcaactctgtcttccatgtgggcgctgagcggctccagcagatgctcttctcggactcgcccttcctccagggcttcctacagcagtgcaagttcacagacgtgaccctgagcccctggagtggggacagcaagtgccaccagcgccgggtgctgacgtacaccatccccatcagcaacccactgggccccaagagcgcctccgtggtggagacacagacgctgttccggcgtggcccccaggccggcgggtgtgtggtggactccgaggtgctgacgcagggcatcccctaccaggactacttctacactgcccaccgctactgcatcctgggtctggcccggaacaaggcgcggctccgagtgtcttctgagatccgctaccgaaagcagccgtggagcctggtgaagtcgctcattgagaagaactcgtggagcggcattgaagactatttccaccatctggagcgagagctcgccaaggctgagaagctgtctctggaggaaggcgggaaggatgcccggggcttgctatccggcctgcggcggcggaagcggcccctgagctggcgggctcacggggacgggccccagcacccagatcctgacccctgtgcccgggccggcattcacacctcgggctccctcagctcccgcttctccgaaccatctgtggaccagggccccggggcaggcatccccagtgccctggttctcatcagcattgtccttatcatcctcatcgccctcaacgtcctgctcttctaccgcctctggtccctggaaaggacagcccacacctttgagtcctggcacagcctggccctggccaagggcaagttcccccagacggccacagagtgggccgagatcctggcgctgcagaagcaattccacagcgtggaggtgcacaagtggaggcagatcctgcgggcctccgtggagctcctggatgagatgaagttctcgctggagaagctgcaccaaggcatcacagtctcagaccctccctttgacacccagccccggcccgatgacagcttttcctgaggaccccggccacgcagctgttcccccacatggacagatggacacacagagcctcggcggccactgctggcacggtgtgagcgccaggcatctcccacccgcccctcccgacggcccaaccaggggctgtgcagacgtggggaccacggaaccgagatgcactttagaccagggagctggcccggcctctggcaggccc

SEQ ID NO: 779 - DNA, 2686 bp, Homo sapiens
  misc_feature: Incyte ID No: 230726.23
gtcgggtgggggcggcggccgcggaaggccaggccggtgccctgcggggacgcccagcgcagcccagccccgcgcagcccagccctgccctgccctgccctgccctgccctgcgcccggggcgcgcccaccgcgccgcatccatgttcgacaccacaccccactctggccggagcacgccaagcagctccccatcgctccggaaacggctgcagctcctgcccccaagccggcccccacctgagccagaaccaggcaccatggtggagaagggatcagatagctcctcagagaagggtggggtgcctgggacccccagcacccagagcctaggcagccggaacttcatccgcaacagcaagaagatgcagagctggtacagtatgctgagccccacttataagcagcgtaatgaggacttccggaaactgttcagcaaactccccgaagcagaacgcctcattgtggattactcctgcgccctgcagcgtgagatcctgctccagggccgcctctacctctctgagaactggatctgcttctacagcaacatcttccgctgggagaccacgatctccatccagctgaaggaagtgacatgtctgaagaaggaaaagacggccaagctgatccccaacgccatccagatctgcacggagagcgagaagcatttcttcacttcctttggggcccgtgaccgctgcttcctcctcatcttccgcctctggcagaatgcactgcttgaaaagacgctgagtccccgcgagctctggcacctggtgcatcagtgctacggctcagagctgggcctcaccagtgaggatgaggactatgtctcccccttgcagctgaacggtctggggacccccaaggaagtgggagatgtgatcgccctgagcgacatcacctcctcgggggcagctgaccgcagccaggagccaagcccagtgggttcgcgccgtggccatgtcacgcccaacctttcccgagccagcagcgacgcagaccatggggcagaggaggacaaggaggagcaggtagacagccagccagacgcctcctccagccagacagtgaccccggtggctgaacccccgagcacagagcccacccagcctgacgggcccaccaccctgggccccttggatctgctgcccagtgaggagctattgacagacacaagtaactcctcttcatccactggggaggaagcggacttggctgccctgcttcccgacctctccggccgcctcctcatcaactctgtcttccatgtgggcgctgagcggctccagcagatgctcttctcggactcgcccttcctccagggcttcctacagcagtgcaagttcacagacgtgacgctgagcccctggagtggggacagcaagtgccaccagcgccgggtgctgacgtacaccatccccatcagcaacccactgggccccaagagcgcctccgtggtggagacacagacgctgttccggcgcggcccccaggccggcgggtgtgtggtggactccgaggtgctgacgcagggcatcccctaccaggactacttctacactgcccaccgctactgcatcctgggtctggcccggaacaaggcgcggctccgagtgtcttctgagatccgctaccgaaagcagccgtggagcctggtgaagtcgctcattgagaagaactcgtggagcggcattgaagactatttccaccatctggagcgagagctcgccaaggctgagaagctgtctctggaggaaggcgggaaggatgcccggggcttgctatccggcctgcggcggcggaagcggcccctgagctggcgggctcacggggacgggccccagcacccagatcctgacccctgtgcccgggccggcattcacacctcgggctccctcagctcccgcttctccgaaccatctgtggaccagggccccggggcaggcatccccagtgccctggttctcatcagcattgtgatctgtgtgagccttatcatcctcatcgccctcaacgtcctgctcttctaccgcctctggtccctggaaaggacagcccacacctttgagtcctggcacagcctggccctggccaagggcaagttcccccagacggccacagagtgggccgagatcctggcgctgcagaagcaattccacagcgtggaggtgcacaagtggaggcagatcctgcgggcctccgtggagctcctggatgagatgaagttctcgctggagaagctgcaccaaggcatcacagtctcagaccctccctttgacacccagccccggcccgatgacagcttttcctgaggaccccggccacgcagctgttcccccacatggacagatggacacacagagcctcggcggccactgctggcacggtgtgagcgccaggcatctcccacccgcccctcccgacggcccaaccaggggctgtgcagacgtggggaccacggaaccgagatgcactttagaccagggagctggcccggcctctggcaggccccccactaacttattttgcccggctgaggttgtggggggcgcctcctggggtgcacgattccctcagctctgggtttaatgtattatatttatttggggccgacagtgccccaataaagggtcagaagtggctgtggctgtgcctgtggggacctgggagttcataaatgt

SEQ ID NO: 780 - DNA, 7132 bp, Homo sapiens
  misc_feature: Incyte ID No: 198499.13
ctgtgcaacggggtcaacgactgtggtgacaacagcgacgaaagcccacagcagaattgccggccccggacgggtgaggagaactgcaatgttaacaacggtggctgtgcccagaagtgccagatggtgcggggggcagtgcagtgtacctgccacacaggctaccggctcacagaggatgggcacacgtgccaagatgtgaatgaatgtgccgaggaggggtattgcagccagggctgcaccaacagcgaaggggctttccaatgctggtgtgaaacaggctatgaactacggcccgaccggcgcagctgcaaggctctggggccagagcctgtgctgctgttcgccaatcgcatcgacatccggcaggtgctgccacaccgctctgagtacacactgctgcttaacaacctggagaatgccattgcccttgatttccaccaccgccgcgagcttgtcttctggtcagatgtcaccctggaccggatcctccgtgccaacctcaacggcagcaacgtggaggaggttgtgtctactgggctggagagcccagggggcctggctgtggattgggtccatgacaaactctactggaccgactcaggcacctcgaggattgaggtggccaatctggacggggcccaccggaaggtgttgctgtggcagaacctggagaagccccgggccattgccttgcatcccatggagggtaccatttactggacagactggggcaacaccccccgtattgaggcctccagcatggatggctctggacgccgcatcattgccgatacccatctcttctggcccaatggcctcaccatcgactatgccgggcgccgtatgtactgggtggatgctaagcaccatgtcatcgagagggccaatctggatgggagtcaccgtaaggctgtcattagccagggcctcccgcatcccttcgccatcacagtgtttgaagacagcctgtactggacagactggcacaccaagagcatcaatagcgctaacaaatttacggggaagaaccaggaaatcattcgcaacaaactccacttccctatggacatccacaccttgcacccccagcgccaacctgcagggaaaaaccgctgtggggacaacaacggaggctgcacgcacctgtgtctgcccagtggccagaactacacctgtgcctgccccactggcttccgcaagatcagcagccacgcctgtgcccagagtcttgacaagttcctgctttttgcccgaaggatggacatccgtcgaatcagctttgacacagaggacctgtctgatgatgtcatcccactggctgacgtgcgcagtgctgtggcccttgactgggactcccgggatgaccacgtgtactggacagatgtcagcactgataccatcagcagggccaagtgggatggaacaggacaggaggtggtagtggataccagtttggagagcccagctggcctggccattgattgggtcaccaacaaactgtactggacagatgcaggtacagaccggattgaagtagccaacacagatggcagcatgagaacagtactcatctgggagaaccttgatcgtcctcgggacatcgtggtggaacccatgggcgggtacatgtattggactgactggggtgcgagccccaagattgaacgagctggcatggatgcctcaggccgccaagtcattatctcttctaatctgacctggcctaatgggttagctattgattatgggtcccagcgtctatactgggctgacgccggcatgaagacaattgaatttgctggactggatggcagtaagaggaaggtgctgattggaagccagctcccccacccatttgggctgaccctctatggagagcgcatctattggactgactggcagaccaagagcatacagagcgctgaccggctgacagggctggaccgggagactctgcaggagaacctggaaaacctaatggacatccatgtcttccaccgccgccggcccccagtgtctacaccatgtgctatggagaatggcggctgtagccacctgtgtcttaggtccccaaatccaagcggattcagctgtacctgccccacaggcatcaacctgctgtctgatggcaagacctgctcaccaggcatgaacagtttcctcatcttcgccaggaggatagacattcgcatggtctccctggacatcccttattttgctgatgtggtggtaccaatcaacattaccatgaagaacaccattgccattggagtagacccccaggaaggaaaggtgtactggtctgacagcacactgcacaggatcagtcgtgccaatctggatggctcacagcatgaggacatcatcaccacagggctacagaccacagatgggctcgcggttgatgccattggccggaaagtatactggacagacacgggaacaaaccggattgaagtgggcaacctggacgggtccatgcggaaagtgttggtgtggcagaaccttgacagtccccgggccatcgtactgtaccatgagatggggtttatgtactggacagactggggggagaatgccaagttagagcggtccggaatggatggctcagaccgcgcggtgctcatcaacaacaacctaggatggcccaatggactgactgtggacaaggccagctcccaactgctatgggccgatgcccacaccgagcgaattgaggctgctgacctgaatggtgccaatcggcatacattggtgtcaccggtgcagcacccatatggcctcaccctgctcgactcctatatctactggactgactggcagactcggagcatccaccgtgctgacaagggtactggcagcaatgtcatcctcgtgaggtccaacctgccaggcctcatggacatgcaggctgtggaccgggcacagccactaggttttaacaagtgcggctcgagaaatggcggctgctcccacctctgcttgcctcggccttctggcttctcctgtgcctgccccactggcatccagctgaagggagatgggaagacctgtgatccctctcctgagacctacctgctcttctccagccgtggctccatccggcgtatctcactggacaccagtgaccacaccgatgtgcatgtccctgttcctgagctcaacaatgtcatctccctggactatgacagcgtggatggaaaggtctattacacagatgtgttcctggatgttatcaggcgagcagacctgaacggcagcaacatggagacagtgatcgggcgagggctgaagaccactgacgggctggcagtggactgggtggccaggaacctgtactggacagacacaggtcgaaataccattgaggcgtccaggctggatggttcctgccgcaaagtactgatcaacaatagcctggatgagccccgggccattgctgttttccccaggaaggggtacctcttctggacagactggggccacattgccaagatcgaacgggcaaacttggatggttctgagcggaaggtcctcatcaacacagacctgggttggcccaatggccttaccctggactatgatacccgcaggatctactgggtggatgcgcatctggaccggatcgagagtgctgacctcaatgggaaactgcggcaggtcttggtcagccatgtgtcccacccctttgccctcacacagcaagacaggtggatctactggacagactggcagaccaagtcaatccagcgtgttgacaaatactcaggccggaacaaggagacagtgctggcaaatgtggaaggactcatggatatcatcgtggtttcccctcagcggcagacagggaccaatgcctgtggtgtgaacaatggtggctgcacccacctctgctttgccagagcctcggactttgtatgtgcctgtcctgacgaacctgatagccggccctgctcccttgtgcctggcctggtaccaccagctcctagggctactggcatgagtgaaaagagcccagtgctacccaacacaccacctaccaccttgtattcttcaaccacccggacccgcacgtctctggaggaggtggaaggaagatgctctgaaagggatgccaggctgggcctctgtgcacgttccaatgacgctgttcctgctgctccaggggaaggacttcatatcagctacgccattggtggactcctcagtattctgctgattttggtggtgattgcagctttgatgctgtacagacacaaaaaatccaagttcactgatcctggaatggggaacctcacctacagcaacccctcctaccgaacatccacacaggaagtgaagattgaagcaatccccaaaccagccatgtacaaccagctgtgctataagaaagagggagggcctgaccataactacaccaaggagaagatcaagatcgtagagggaatctgcctcctgtctggggatgatgctgagtgggatgacctcaagcaactgcgaagctcacgggggggcctcctccgggatcatgtatgcatgaagacagacacggtgtccatccaggccagctctggctccctggatgacacagagacggagcagctgttacaggaagagcagtctgagtgtagcagcgtccatactgcagccactccagaaagacgaggctctctgccagacacgggctggaaacatgaacgcaagctctcctcagagagccaggtctaaatgcccacattctcttccctgcctgcctgttccttctcctttatggacgtctagtccttgtgctcgcttacaccgcaggccccgcttctgtgtgcttgtcctcctcctcctcccaccccataactgttcctaagccttcaccggagctgtttaccacgtgagtccataactacctgtgcacaagaaatgatggcacatcacgagaatttagacctggattttaccatgaacctcacatcttgtactccatcctgggccccctgaaactgcttattcgtgattcctcaccagcgtagagctccacctcccctttccccagtaccctcagtgcctgcttctcagtgctgatgcagctgatgacccaggactgcgctctgccccatcacagccagcatgactgcttctctgagagaacttgcccatcaggggctgggacatgggggtgtgggtaaagacagggatgaaggatagaggctgagagaagaaggaagaatcagcccagcaggtatgggcatctgggaaacctccagcctcaagtgtgttggtaacatgaaaaagctctggggggtagttggatctgggtgtctggtccattgctggcagtggacattattcttgccctaagagacactgccttttcagcagcagatactggtgagatgggggtggctcaggctgttcttcctcctcctagaatgtctggagctgtttctacattcagataactgggtcccctatcacaaggctactggctaataggaattccctcctggtgccaccactggccagtacctttcctaagtctttgctctaattaaccaggttgtgagccagtggcttgagtgaatgttaggccttgggggctgagtctctgaaaagtctaagaagctctgcctagaccaaatatggtatacctcctgacccctctctccctcatgtcctgggattctggggaagagacctagaaacaagctttcaaagaaaaaccagaagttgtcataaatggtcagaaagaacgatcaggttggagacttgggaaacccagggcctaaagagaagtatccatgagggtcaaacttcctgttgaacttcctatgttctttctcaagtgctcagggatctaagttagtggacagcaagcctgtggctacggggtggtgatgttcctcttccagctgtcccctcagctaaggggcttagtttccatgtgggatgccatcacttggttcatgctcattcacacaaagggcacgtgtctcagcctggtatcagggaaattgagacttatttttgccctaaaacgtctccctagctgttcttcgtggggttttttggtttgtttttttgcctaatttgctttttctgaccaagccttgtggcaccagcaatctccaaagtcctgtggtgggagggctgaataaataaaaatacaaagaggtgggtaaggagtaggaaggtagagagcaccactgatgaggccctcctagcccatggcagacccagacctcttctcccccaggaattagaagtggcaggagagaacaacaggggctgggaatggaggggagaatttctaggggaagtttcctgagttgaaacttctcctgtggttactggtattgagaaatcagctaccaaagtgaaaaaggacaagatcaattcttttctagtcagttctaagactgctagagagagataccaggcccttagccttgctctcagtagcgtcagccccagttctgagcctccccacattacacttaacaagcagtaaaggagtgagcactttgggtccttagactcatgtctggggaggaagagcaagtagaaaagtggcattttcttgattggaaagggggaaggatcttattgcacttgggctgttcagaatgtagaaaggacatatttgaggaagtatctatttgagcactgatttactctgtaaaaagcaaaatctctctgtcctaaactaatggaagcgattctcccatgctcatgtgtaatggttttaacgttactcactggagagattggactttctggagttatttaaccactatgttcagtattttaggactttatgataatttaatataaatttagcttttcttaatcaccttgcctggcttggagtcatgactaatcctgcacctgctctgtctggcagacccatgctgtggaaaacctgcttacagacatcacttttaagtcctttgtggatgtgggcacagtgaagagcaataaagagtgtgaggttcctgctggagttttcagctcatctggagaagacaggtcgaggccagagttccttgactgatgaaacctttatttcctctggaagaggaatggtagatgggtttcctcttgagtgctgactctgactggttggtagtggctgcct

SEQ ID NO: 781 - DNA, 7920 bp, Homo sapiens
  misc_feature: Incyte ID No: 331582.4
cactaacgctcttcctagtccccgggccaactcggacagtttgctcatttattgcaacggtcaaggctggcttgtgccagaacggcgcgcgcgcgacgcacgcacacacacggggggaaacttttttaaaaatgaaaggctagaagagctcagcggcggcgcgggccgtgcgcgagggctccggagctgactcgccgaggcaggaaatccctccggtcgcgacgcccggccccgctcggcgcccgcgtgggatggtgcagcgctcgccgccgggcccgagagctgctgcactgaaggccggcgacgatggcagcgcgcccgctgcccgtgtcccccgcccgcgccctcctgctcgccctggccggtgctctgctcgcgccctgcgaggcccgaggggtgagcttatggaacgaaggaagagctgatgaagttgtcagtgcctctgttcggagtggggacctctggatcccagtgaagagcttcgactccaagaatcatccagaagtgctgaatattcgactacaacgggaaagcaaagaactgatcataaatctggaaagaaatgaaggtctcattgccagcagtttcacggaaacccactatctgcaagacggtactgatgtctccctcgctcgaaattacacggtaattctgggtcactgttactaccatggacatgtacggggatattctgattcagcagtcagtctcagcacgtgttctggtctcaggggacttattgtgtttgaaaatgaaagctatgtcttagaaccaatgaaaagtgcaaccaacagatacaaactcttcccagcgaagaagctgaaaagcgtccggggatcatgtggatcacatcacaacacaccaaacctcgctgcaaagaatgtgtttccaccaccctctcagacatgggcaagaaggcataaaagagagaccctcaaggcaactaagtatgtggagctggtgatcgtggcagacaaccgagagtttcagaggcaaggaaaagatctggaaaaagttaagcagcgattaatagagattgctaatcacgttgacaagttttacagaccactgaacattcggatcgtgttggtaggcgtggaagtgtggaatgacatggacaaatgctctgtaagtcaggacccattcaccagcctccatgaatttctggactggaggaagatgaagcttctacctcgcaaatcccatgacaatgcgcagcttgtcagtggggtttatttccaagggaccaccatcggcatggccccaatcatgagcatgtgcacggcagaccagtctgggggaattgtcatggaccattcagacaatccccttggtgcagccgtgaccctggcacatgagctgggccacaatttcgggatgaatcatgacacactggacaggggctgtagctgtcaaatggcggttgagaaaggaggctgcatcatgaacgcttccaccgggtacccatttcccatggtgttcagcagttgcagcaggaaggacttggagaccagcctggagaaaggaatgggggtgtgcctgtttaacctgccggaagtcagggagtctttcgggggccagaagtgtgggaacagatttgtggaagaaggagaggagtgtgactgtggggagccagaggaatgtatgaatcgctgctgcaatgccaccacctgtaccctgaagccggacgctgtgtgcgcacatgggctgtgctgtgaagactgccagctgaagcctgcaggaacagcgtgcagggactccagcaactcctgtgacctcccagagttctgcacaggggccagccctcactgcccagccaacgtgtacctgcacgatgggcactcatgtcaggatgtggacggctactgctacaatggcatctgccagactcacgagcagcagtgtgtcacactctggggaccaggtgctaaacctgcccctgggatctgctttgagagagtcaattctgcaggtgatccttatggcaactgtggcaaagtctcgaagagttcctttgccaaatgcgagatgagagatgctaaatgtggaaaaatccagtgtcaaggaggtgccagccggccagtcattggtaccaatgccgtttccatagaaacaaacatccccctgcagcaaggaggccggattctgtgccgggggacccacgtgtacttgggcgatgacatgccggacccagggcttgtgcttgcaggcacaaagtgtgcagatggaaaaatctgcctgaatcgtcaatgtcaaaatattagtgtctttggggttcacgagtgtgcaatgcagtgccacggcagaggggtgtgcaacaacaggaagaactgccactgcgaggcccactgggcacctcccttctgtgacaagtttggctttggaggaagcacagacagcggccccatccggcaagcagataaccaaggtttaaccataggaattctggtgaccatcctgtgtcttcttgctgccggatttgtggtttatctcaaaaggaagaccttgatacgactgctgtttacaaataagaagaccaccattgaaaaactaaggtgtgtgcgcccttcccggccaccccgtggcttccaaccctgtcaggctcacctcggccaccttggaaaaggcctgatgaggaagccgccagattcctacccaccgaaggacaatcccaggagattgctgcagtgtcagaatgttgacatcagcagacccctcaacggcctgaatgtccctcagccccagtcaactcagcgagtgcttcctcccctccaccgggctccacgtgcacctagcgtccctgccagacccctgccagccaagcctgcacttaggcaggcccaggggacctgtaagccaaacccccctcagaagcctctgcctgcagatcctctggccagaacaactcggctcactcatgccttggccaggaccccaggacaatgggagactgggctccgcctggcacccctcagacctgctccacaatatccacaccaagtgcccagatccacccacaccgcctatattaagtgagaagccgacaccttttttcaacagtgaagacagaagtttgcactatctttcagctccagttggagttttttgtaccaacttttaggattttttttaatgtttaaaacatcattactataagaactttgagctactgccgtcagtgctgtgctgtgctatggtgctctgtctacttgctcaggtacttgtaaattattaatttatgcagaatgttgattacagtgcagtgcgctgtagtaggcatttttaccatcactgagttttccatggcaggaaggcttgttgtgcttttagtattttagtgaacttgaaatatcctgcttgatgggattctggacaggatgtgtttgctttctgatcaaggccttattggaaagcagtcccccaactacccccagctgtgcttatggtaccagatgcagctcaagagatcccaagtagaacctcagttgattttctggattccccatctcaggccagggccaaggggcttcaggtccaggctgtgtttggctttcagggaggccctgtgccccttgacaactggcaggcaggctcccagggacagctgggagaaatctggcttctggccaggaagctttggtgagaacctgggttgcagacaggaatcttaaggtgtagccacaccaggatagagactggaacactagacaagccagaacttgaccctgagctgaccagccgtgagcatgtttggaaggggtctgtagtgtcactcaaggcggtgcttgatagaaatgccaagcacttctttttctcgctgtcctttctagagcactgccaccagtaggttatttagcttgggaaaggtggtgtttctgtaagaaacctactgcccaggcactgcaaaccgccacctccctatactgcttggagctgagcaaatcaccacaaactgtaatacaatgatcctgtattcagacagatgaggctttccatgggaccacaactattttcagatgtgaaccattaaccagatctagtcaatcaagtctgtttactgcaaggttcaacttattaacaattaggcagactctttatgcttgcaaaaactacaaccaatggaatgtgatgttcatgggtatagttcatgtctgctatcattattcgtagatattggacaaagaaccttctctatggggcatcctctttttccaacttggctgcaggaatctttaaaagatgcttttaacagagtctgaacctatttcttaaacacttgcaacctacctgttgagcatcacagaatgtgataaggaaatcaacttgcttatcaacttcctaaatattatgagatgctggcttgggcagcatccccttgaactcttcactcttcaaatgcctgactagggagccatgtttcacaaggtctttaaagtgactaatggcatgagaaatacaaaaatactcagataaggtaaaatgccatgatgcctctgtcttctggactggttttcacattagaagacaattgacaacagttacataattcactctgagtgttttatgagaaagccttcttttgggggtcaacagttttcctatgctttgaaacagaaaaatatgtaccaagaatcttggtttgccttccagaaaacaaaactgcatttcactttcccggtgttccccactgtatctaggcaacatagtattcatgactatggataaactaaacacgtgacacaaacacacacaaaagggaacccagctctaatacattccaactcgtatagcatgcatctgtttattctatagttattaagttctttaaaatgtaaagccatgctggaaaataatactgctgagatacatacagaattactgtaactgattacacttggtaattgtactaaagccaaacatatatatactattaaaaaggtttacagaattttatggtgcattacgtgggcattgtctttttagatgcccaaatccttagatctggcatgttagcccttcctccaattataagaggatatgaactgagtttttcttttgttgtttgttcttagctgtaattcctatgcttctatttcagagagccaggagagtttgatattaaaggaggttaaaactgtgatcttatgccatgtcatcaatggccacttaggggccatggctgatgacacattcttatctctacagtactaatgtgttattatagagccatgcattttatttctgaataagaacatatttaaactaatattcccttacaatatggacagtattaatccttccaagatgcagtatttatcaagtgaagcatatttagcagcaaattccattttaacataacttaggaaccaataaccagggtgttttgtggttgggggaggcacggggtggagtattcttttttatatcctcaaaacaaaaaaaatcaatacttatatttcaatggcaatctagtattttttttaaaagactgtataggcatgaataatagaggtggtttgagttttgtagggccatcacctggaaagtcaatgtgactagacacaaagtagcccagaggctacttttcttcctacagcttattatagttgtaggttctatgacctcacttcatgggttccaggcaattccgctgaaaggtttgtctcctgaaattttttaagtttgttttcctgacacatgtaatcagatgtgtagcaaccgagggaaacgaagcctaacattctccattgtggaaatacacacaggaggttacacttcacagcgtggatttttccagcttacacatgtgggatgacatcacagaaaccacaaaagcagcaaattaaactgtaggagagtcaatactcctgacgagtctcgggggggggcatttttatgccttcttaactttatgagaattctcaggctgaactataggccattgttcccaggcaaatcaatacatcaatgcatcctcaaaaaaaaaaaaaaaaaaaaaaacggctaaaactgtgtcaaaatgttcttaaggagcctatggtctccacggtgctaaaaagagcctggtgctgggccgactggcaggggctgagcatcctcctgccccctcgccactgatgtttactaagcactctgagccaatgagacccccagcagcagaaagggcacaaggtggcgccagggcagcagggccagatctttctcatgcacctcgacctcttgcagactttcttcgtgagatgtactactcatttcaaaactgctttgcagggctcccctatgtattcggggggcccacggcacactcaggctggagatccttcctcactgcgctcaagatggcctcagccagacaccagttacccagctgaaagtcacaatccctcccagaagtctcccaacactagtgctgaccagaggtggggctctcaggctaggagtttcacacacaatgacaggctgctgggggacattgcaggaccccttttcctctcctctccatgctagaagccagccctaggcagctgcagttactccctgtgactcagcagcaggctgattcaacacagctgcccacacaaagccagtggctaatacatctgtttacctttccctatcacccagacacaagcccctttcccaggtcaaaccacaggccgatgcatctccagtttgacagtcaaatcactacttccattgctactttagatcagccaaagtggtgactgctgcagtgtgtggctatccctacaaggcccacccaagggatgcccaaagcccaaccttctccagggctgcagcccagagcaaccccaccagcctaagtccagcagaggacctcccacccaatgtcttgttctaattagaaggggaagttagccacagaaaatcaacttatctataattacaaaattctcttgactcaccttaaagttcctattgacatctactgcttttaaacctatttgaaaactctgatactaaaacaaatgacactctaagaaagtttgggagccccatgctgagaaccatttctgtgcagtgaggatgtttccagaagctacttacctacatgtgaatgtgccattttctttccttttgtagagaaaatcccctttactttttggaacagtaatggcagcttctagtacagccattacagtttcatatgagaaaaattaagaataactataaaattgttaaaatatccaataatggataatgatggccagaagatttaacatacaaagtaattctcaatgtaaagctattcagctcttccaggttgaatgccctgtaacccaccctgaccttccacatcatcttcaaaaagcagtttctctgttccccatgattctcctataaggtaactctttagtcctccatttagcacattttaaatcctccaaagaataagtatcatgtgattattttagctttacaaaaaaaaagttgaatggcgttttattttcatggcctataagcaggtaccttagtagggcagatataggaaaaacaaattagagcaaaacaaatcctctacaaatccaaggcaggaaaagtggtggcagagtgactcattctcctgtccctcccatcaggtcaaatcaggaggctgcagtgaatgcctgttctttgaatgtgtagcagttgttcctgtaactctttaaaacttggctataggctgtttagcacagtacagattaaagatacagttacgtaaacagcaaagtaattttatagtgcttcatccatttatcatgctttggtttgctaattttttcacatacctttttctatcacagtctgttgcttttgtacacatttctcatattggggttcgacaggtaaacacaaactgctatttcagtagaaaaagttattgttatgaatattaaacccaataaattgtataaaggt

SEQ ID NO: 782 - DNA, 1944 bp, Homo sapiens
  misc_feature: Incyte ID No: 2550869CB1
ttccagaatccaagatggcgggatccaggcaaaggggtctccgggccagagttcggccgctgttctgcgccttgctgctgtcactcggtcgcttcgtccggggcgacggcgtgggaggagaccccgcggtcgcgttgccacatcgccgtttcgagtacaaatacagcttcaaggggccgcacctggtgcagagcgacgggaccgtgcccttctgggcccacgcggggaatgctattccaagttcagatcaaattcgagtagcaccatctttaaaaagccaaagaggctcagtgtggacaaagacaaaagcggcctttgagaactgggaagttgaggtgacatttcgagtgactggaagaggtcggattggagctgatggcctagcaatttggtatgcagaaaatcaaggcttggagggccctgtgtttggatcagctgatctgtggaatggtgttggaatattttttgattcttttgacaatgatggaaagaaaaataatcctgctatagtaattataggcaacaatggacaaatccattatgaccatcaaaatgacggggctagtcaagctttggcaagttgccagagggacttccgcaacaaaccctatcctgtccgagcaaagattacctattaccagaacacactgacagtaatgatcaataatggctttacaccagataaaaatgattatgaattttgtgccaaagtggaaaatatgattatccctgcacaagggcattttggaatatctgctgcaactggaggtcttgcagatgaccatgatgtcctttcttttctgactttccagttgactgaacctggaaaagagccgcccacaccagataaagaaatttcggaaaaggaaaaagaaaagtatcaggaggaatttgagcactttcaacaagaattggataaaaaaaaagaggaattccagaagggccaccccgacctccaagggcagcctgcggaggaaatatttgagagtgtaggagatcgagagctaagacaagtctttgaaggacagaatcgtattcatcttgaaatcaagcagctgaaccggcagttagatatgattcttgatgaacagagaagatatgtctcttccttaacagaggaaatctctaaaagaggagcaggaatgcctgggcagcatgggcagattactcaacaagaactggatactgttgtgaaaactcagcatgagattctgagacaagtaaatgaaatgaaaaattccatgagtgaaaccgtcagactggtcagtggaatgcagcaccctggctctgctggaggcgtctatgagacaacacagcacttcattgacatcaaagagcacctgcacatagtaaagagggacatagataacttagtgcagcgaaatatgccatcaaatgaaaagccgaaatgcccagaactaccaccatttccatcatgtttgtctacggtccacttcattatatttgttgtggtgcaaactgtattattcattggttatatcatgtataggtctcagcaagaagcagctgccaaaaaattcttttgactaccattttcctgtgtacttcatctatttgtgtacaaaatgatgtcgttttgagggaatttaagtatttaaattgcttcatagtctaaattattaattttcttaataaaataactgtttaaacattgatttgcagttaagaataaaccttaaagcaaagacaaccacattttaatttgttcacagtatgtaaatctgtctaaatttcagtgaatttctggtcagtatgatgcagcctctgagcagaatattgaccagtaagagggtaaataaagtgggggcaacccctggatatgaatgttaccccctaagtctccaatattgcaggtttccctgtataacgtaaacacacttgccctcatgcctcccagaatatgaggtctaattaagaagtccc

SEQ ID NO: 783 - DNA, 2507 bp, Homo sapiens
  misc_feature: Incyte ID No: 348110.2
  unsure 1219-1249, 1561-1706, 2396, 2429, 2480: a, t, c, g, or other
ttcttggggctgatgtccgcaaatatgcagaattaccggccgggtcgctcctgaagccagcgcggggagcgagcgcggcggcggccagcaccgggaacgcaccgaggaagaagcccagcccccgccctccgccccttccgtccccaccccctacccggcggcccaggaggctccccggctgcggcgcgcactccctgtttctcctcctcctggctggcgctgcctgcctctccgcactcactgctcgccgggcgccgtccgccagctccgtgctccccgcgccaccctcctccgggccgcgctccctaagggatggtactgaatttcgccgccacaggagaccggctggagcgcccgccccgcgcctcgcctctcctccgagcagccagcgcctcgggacgcgatgaggaccttggcttgcctgctgctcctcggctgcggatacctcgcccatgttctggccgaggaagccgagatcccccgcgaggtgatcgagaggctggcccgcagtcagatccacagcatccgggacctccagcgactcctggagatagactccgtagggagtgaggattctttggacaccagcctgagagctcacggggtccatgccactaagcatgtgcccgagaagcggcccctgcccattcggaggatgagaagcatcgaggaagctgtccccgctgtctgcaagaccaggacggtcatttacgagattcctcggagtcaggtcgaccccacgtccgccaacttcctgatctggcccccgtgcgtggaggtgaaacgctgcaccggctgctgcaacacgagcagtgtcaagtgccagccctcccgcgtccaccaccgcagcgtcaaggtggccaaggtggaatacgtcaggaagaagccaaaattaaaagaagtccaggtgaggttagaggagcatttggagtgcgcctgcgcgaccacaagcctgaatccggattatcgggaagaggacacggatgtgaggtgaggatgagccgcagccctttcctgggacatggatgtacatggcgtgttacattcctgaacctactatgtacggtgctttattgccagtgtgcggtctttgttctcctccgtgaaaaactgtgtccgagaacactcgggagaacaaagagacagtgcacatttgtttaatgtgacatcaaagcaagtattgtagcactcggtgaagcagtaagaagcttccttgtcnnnnnnnnnnnnnnnnnnnnnnnnnnnnnnnacaaaaccacaaatgacaaaaacaaaacggactcacaaaaatatctaaactcgatgagatggagggtcgccccgtgggatggaagtgcagaggtctcagcagactggatttctgtccgggtggtcacaggtgcttttttgccgaggatgcagagcctgctttgggaacgactccagaggggtgctggtgggctctgcagggcccgcaggaagcaggaatgtcttggaaaccgccacgcgaactttagaaaccacacctcctcgctgtagtatttaagcccatacagaaaccttcctgagagccttaagtggnnnnnnnnnnnnnnnnnnnnnnnnnnnnnnnnnnnnnnnnnnnnnnnnnnnnnnnnnnnnnnnnnnnnnnnnnnnnnnnnnnnnnnnnnnnnnnnnnnnnnnnnnnnnnnnnnnnnnnnnnnnnnnnnnnnnnnnnnnnnnnnnnncttggatgacatttacaccgataacacacaggctgctgtaactgtcaggacagtgcgacggtatttttcctagcaagatgcaaactaatgagatgtattaaaataaacatggtatacctacctatgcatcatttcctaaatgtttctggctttgtgtttctcccttaccctgctttatttgttaatttaagccattttgaaagaactatgcgtcaaccaatcgtacgccgtccctgcggcacctgccccagagcccgtttgtggctgagtgacaacttgttccccgcagtgcacacctagaatgctgtgttcccacgcggcacgtgagatgcattgccgcttctgtctgtgttgttggtgtgccctggtgccgtggtggcggtcactccctctgctgccagtgtttggacagaacccaaattctttatttttggtaagatattgtgctttacctgtattaacagaaatgtgtgtgtgtggtttgtttttttgtaaaggtgaagtttgtatgtttacttaatattacctgttttgtatacctgagagcctgctatgttctttttttgttgatccaaaattaaaaaaaaaaataccaccaacaaaacccgtggacgtgagaaagcgttttgtggtacgtttttctagcactggagtctagaccctggttgccaggtcatgcggtgctgtgtncggtggaaacggaggtcagagctttctgggtgnggtccctggacctgcctccatggtggcacccgtgggatgcctgcctacctnggacttcagcacctatgggggttaggc

SEQ ID NO: 784 - DNA, 1810 bp, Homo sapiens
  misc_feature: Incyte ID No: 2797546CB1
gcaagacagcaaggcatagagacaacatagagctaagtaaagccagtggaaatgaagagtcttccaatcctactgttgctgtgcgtggcagtttgctcagcctatccattggatggagctgcaaggggtgaggacaccagcatgaaccttgttcagaaatatctagaaaactactacgacctcaaaaaagatgtgaaacagtttgttaggagaaaggacagtggtcctgttgttaaaaaaatccgagaaatgcagaagttccttggattggaggtgacggggaagctggactccgacactctggaggtgatgcgcaagcccaggtgtggagttcctgatgttggtcacttcagaacctttcctggcatcccgaagtggaggaaaacccaccttacatacaggattgtgaattatacaccagatttgccaaaagatgctgttgattctgctgttgagaaagctctgaaagtctgggaagaggtgactccactcacattctccaggctgtatgaaggagaggctgatataatgatctcttttgcagttagagaacatggagacttttacccttttgatggacctggaaatgttttggcccatgcctatgcccctgggccagggattaatggagatgcccactttgatgatgatgaacaatggacaaaggatacaacagggaccaatttatttctcgttgctgctcatgaaattggccactccctgggtctctttcactcagccaacactgaagctttgatgtacccactctatcactcactcacagacctgactcggttccgcctgtctcaagatgatataaatggcattcagtccctctatggacctccccctgactcccctgagacccccctggtacccacggaacctgtccctccagaacctgggacgccagccaactgtgatcctgctttgtcctttgatgctgtcagcactctgaggggagaaatcctgatctttaaagacaggcacttttggcgcaaatccctcaggaagcttgaacctgaattgcatttgatctcttcattttggccatctcttccttcaggcgtggatgccgcatatgaagttactagcaaggacctcgttttcatttttaaaggaaatcaattctgggctatcagaggaaatgaggtacgagctggatacccaagaggcatccacaccctaggtttccctccaaccgtgaggaaaatcgatgcagccatttctgataaggaaaagaacaaaacatatttctttgtagaggacaaatactggagatttgatgagaagagaaattccatggagccaggctttcccaagcaaatagctgaagactttccagggattgactcaaagattgatgctgtttttgaagaatttgggttcttttatttctttactggatcttcacagttggagtttgacccaaatgcaaagaaagtgacacacactttgaagagtaacagctggcttaattgttgaaagagatatgtagaaggcacaatatgggcactttaaatgaagctaataattcttcacctaagtctctgtgaattgaaatgttcgttttctcctgcctgtgctgtgactcgagtcacactcaagggaacttgagcgtgaatctgtatcttgccggtcatttttatgttattacagggcattcaaatgggctgctgcttagcttgcaccttgtcacatagagtgatctttcccaagagaaggggaagcactcgtgtgcaacagacaagtgactgtatctgtgtagactatttgcttatttaataaagacgatttgtcagttaaaaaa

SEQ ID NO: 785 - DNA, 2239 bp, Homo sapiens
  misc_feature: Incyte ID No: 233942.1
agagaataacaagtctgggactgacgtaggaaaaacagtagtctgtttaagttgagaggaggaggatgtggacgagagaagggaggagagggaagaactgaaatgtctcctcacccagggtggttattgggcccaacttggaatggggttgagtacgaaggttaaaaaacatatactttggtattatattggtcattgtaatagcagttgtaaaatatggggggaaaagggatcatttgctttcctttcatggtgttaatgtgtgcctgaatctatagccgctaaaatgtaaggctgtccacctgacttatttaaatattatcagagaatagaaagtaatcactttttaagtgtacctatgtgctgccccttaaaacattcatggcatctggcaaatagacccttgtaggctggcctggcatattcagatgttgccgcatcatcacagagaaggtcaaatgaagatgtaaccattgctgctcatgtgtcttctctaagcaacaaggggagcgggatgtaagagagaagttgctaatgatactgtacaaaggatggattaaataatgaagtcaatttcattgatagaaaatgcaaattttaagattctcagtgtatgaggtctcagcctcgggagcatttattttttactttcctgctaaaaatccactggggaggtataaaattcactccaaagaagtttgcctgggccaaaagcctccaggttccttctgagaacaaaatactaatgatttttttttttttttggctgcttgggagagactttcagcattctttcacgatatccagatatgtcccttcagcacacacactcaactttctcatctggttcgtttcatcctcccgaaagaacggtgctctcccactcttactctatttcaaagagctactctgtctcaaccacagcagccctgccaagaaaaggcaagatgaaaggctagagcatgtgctaccttgagatttcaagaagtgtcctacctcagctgaagatggagaaacggggagtggagaggggatcagcccagggtaccatgtgatgactaatatgccactcattaagggcttttacctcggctgtccacatccagtcatgcatttggggccaggcatgcctgcgaaatgattgacattcctgtaggtgccccatagaggtgtggcattgagaaattatgtctggaaaatacagccagtgtagtgaccagctgagttaccatataccctgatgattccccttctgtaacagaaggtgacaacaactttgtgaactttctatatctttatctgatgccccaagtggcatcttctttatgtacatgccttagttgagaatatgagactgctctaatctttgtgaatgccttcacacttcagctgaggatgtcaccttctctgtcactccccatcctgcaacctctgcctttgctctgtctaccccagcaattttcatagtgttatccaggtactgtgctaaaaggtcagctcttctgtaaaatgccatgcttcgcagcttcaaaaagcaaaattctgtatttcatggagggagggaagggtcattctcttctaagaaaaatagactggacaggcgaatgcatgcatgcatgtgtttagagttgcttctcagaagacaaagagatgatagcaactattagaatatgactgaatgactgagtgaatgagttgaaggcctagctcgggctgataaagcttttgccttagtagaggttttatgtcaacaccttcaggagggaagcccttatttctgggttgaactccccttccatgatattatgctagcaattgccatcacttagttcctggcgaaggcagaaaaagaaaacaaaaaatcagcattgtcattgacaaaactggatgctgaagataaagtaaaattgtcttttcccttgtcccacatttttgggattaaagccagaattgaataggaaatacagtactatttctgaagttgatagccgatctttaagaagaccctgtctttaaaatgaaactagcaggcaaacacctaaataatcgaaaattaccaaagaacaacaacgaaacaagaaaacctaaagatttttacttcctattcttattcctttccttattactgtgacaccccttgcattgctcagttgcctgtgtgtcaaaataacttgtggacgttggaaattatttgaaaatgtattgtgtggaatgtaataaaatgatgatatttttatac

SEQ ID NO: 786 - DNA, 2349 bp, Homo sapiens
  misc_feature: Incyte ID No: 223107.5
gggattaggagcagacagcaaggaacctgtaccctttcctgctcccagttattcaactgagtacagatgtttcacagcctccacatgtttatcttctggaagatggtttagaattatggttagtaactttggaaaacagtccatgtattacaccagagttgcttcgtatatttcagaatatgtcaccacttcttgaactaagttcagaaaatcttagaacttgctttaagatcatcaatggttatatctttttatcatcaacagaatttttacagacatacgcagtaggtctatgccagtcctttgtgaacttttaaaggaaattactacagaaggtcaagttcaggtgctcaaggtgtggaaaatgcccttaaagtgaacccaatactaggtccacaaatgtttcaaccgattttaccctatgttttcaagggtattatagaaggggagaggtatcctgtagtgatgtccacgtatcttggagttatgggtcgagttctactacaaaacactagttttttttcttcactacttaatgagatggcccataaatttaatcaggagatggaccagcttttgggaaatatgattgaaatgtgggttgatcgaatggacaacattacccagcctgaaagaagaaaactttcagctttggctttgctctctcttctgccatctgataatagtgttatccaagataaattctgtgggattataaacatttcagtagaaggcctgcatgatgtcatgacggaagatcctgaaacaggaacttataaagactgtatgttgatgtctcatcttgaggaaccaaaagtaacagaagatgaagaaccacccacagaacaagataagaggaaaaagatgctggccctgaaggaccctgttcatacagtgtcactgcagcagttcatctacgagaagctcaaggcacagcaggagatgctaggagaacaaggtttccagtccctcatggaaacagtggatacggagattgtcacccagctacaggagtttttgcaaggattctaagagcacatgacatgtggctgcctcccctttcagaaacaagctgagtaacccagcctgccgtttgtatgtgagagcctgctgagatgaagaaatcacttcatgaaaataagcaaagaccacacattttttactacaaaatgtaaaggataaatgtaaatcctgcataactaaaatcacaaacctattcctcaaaagaatttaattttatatttatgagggggcccttcactaaaaagtacatgtaaaagtacatttgatgacaatagctgcttagtttcctgttaagagaagaaactttatcttttaattatgtgctcttaatatttgaagatgagagttaatacctgagatgtttttctgcaaccaaaattcattaaatttggctgccttatcctttttttaagctaatgaaactacaggtttgaaaaatgacaaagctgttcagatgatgctattaaagaaatgtgtgtactaagcaaaaatatataaatagtgacaaatacacattaccaagcttatcttgcaagggagttattttcatctaacatagaaagtgtgttttatcagacaaatgcttttattttcattctaataatttgatacagaaattagtaaaggcatttttttctttttttttccagtaaatacattgggtctataaatgtgcatttgtaagggccacaaaagtgaacgtgtggtactgtagtaccacgtgggagacctctggttatggtttagtcctagttcctttgttactcctgtgagcaccgagaagaactgggcgactcccagtcccacctgtgctgtgacagtcccacgtggctatgacagactgtttagtacttacccttctcaggttcctcagtgcaggggtgcatcagggcctcaataataggggtatacctgggaggatccagcagtaatccccagggtactaggattactagtactctgatggaactagtcttccttccttattcctcgaacatgcagtacataaaaaggggaaaaggagaaaaaaaaagccttactttgttttacttgccatttattgtaaggaaactttaaagcattttttaggaaatactcaaaagcaaggttggaaaatgttttatctttctatagaaagttgggtacagtatgtaactgcgggaaacccactgcccctttgtaagctgtggaacccaaactgtatggggatatttgatgttttcagaaagaggaagaaaatatggtccaaattaaattttccaaagatacctcaccttggactgatttgtctgactacttttcttgctccccccaaaaaatgagttc

SEQ ID NO: 787 - DNA, 3758 bp, Homo sapiens
  misc_feature: Incyte ID No: 1383816.3
cgcgcctgcgcagtggggagcagctcgctcctgggctttggggctggctgcagtctgtctgagggcggccgaagtggctggctcatttaagatgaggcttctgctgcttctcctagtggcggcgtctgcgatggtccggagcgaggcctcggccaatctgggcggcgtgcccagcaagagattaaagatgcagtacgccacggggccgctgctcaagttccagatttgtgtttcctgaggttataggcgggtgtttgaggagtacatgcgggttattagccagcggtacccagacatccgcattgaaggagagaattacctccctcaaccaatatatagacacatagcatctttcctgtcagtcttcaaactagtattaataggcttaataattgttggcaaggatccttttgctttctttggcatgcaagctcctagcatctggcagtggggccaagaaaataaggtttatgcatgtatgatggttttcttcttgagcaacatgattgagaaccagtgtatgtcaacaggtgcatttgagataactttaaatgatgtacctgtgtggtctaagctggaatctggtcaccttccatccatgcaacaacttgttcaaattcttgacaatgaaatgaagctcaatgtgcatatggattcaatcccacaccatcgatcatagcaccacctatcagcactgaaaactcttttgcattaagggatcattgcaagagcagcgtgactgacattatgaaggcctgtactgaagacagcaagctgttagtacagaccagatgctttcttggcaggctcgttgtacctcttggaaaacctcaatgcaagatagtgtttcagtgctggcatattttggaattctgcacattcatggagtgcaataatactgtatagctttccccacctcccacaaaatcacccagttaatgtgtgtgtgtgtgttttttttaaggtaaacattactacttgtaactttttttcttagtcatatttgaaaaagtagaaaattgagttacaatttgattttttttccaaagatgtctgttaaatctgttgtgcttttatatgaatatttgttttttatagtttaaaattgatcctttgggaatccagttgaagttcccaaatactttataagagtttatcagacatctctaatttggccatgtccagtttatacagtttacaaaatatagcagatgcaagattatgggggaaatcctatattcagagtactctataaatttttgtgtatgtgtgtatgtgcgtgtgattaccagagaactactaaaaaaaccaactgctttttaaatcctattgtgtagttaaagtgtcatgccttgaccaatctaatgaattgattaattaactgggcctttatacttaactaaataaaaaactaagcagatatgagttaaatttaaaagtttcaatttattgctcagtgtacctgttaacattatatttaacaattgcttaaatttttgtttttgatttatggataatttcttaagagtacacactttagatacacaaataatcgttcatttaccatctttaggatcattgaaactcatctcactaaagaaagttcacttgaacctctttatagcattgatactaggtgaacagaaattacctgactaataatttgtctaacatcatatatcagaattttattgtatatgatgaacaaaacttaaaattttttaaatttaatttttaaatactgtttcagagttctaaaaaggcagttttttaaaaaacttaagttgataaaaactgtaagaataatttagcagaaatagaaccagaatgtagaagagtagtcatgtaacagcagtaataacatacttcagcttccatataggaatagaagtggtagagccaaaagtgatttaggagaagttataaggtacaggttgagtatcccttttccaaaaatgcttgggacaagaagtatttcagatttcataatttttttcaaagtttggaatatttgcattatacttaccagttgggcatcccaaatctgaaatctgaaatgttccatgagcatttcctttgagtgtcatgttggcactcaaaaaggttcaacattgagtccacttaacacttaggtgttagaagacctaactttctgtaacaattaaccttatactttgtttgtcatcgaatatttgttgaatgcatgtcaggtaatggtcttgattgtgatagcttcaaggtggaacatactgtaatctccagatgctaggaagttagtctaataattcactgcagaaaattgattaagtggctgtccttttaattaagagtgtggagtcataaacttaagttcttcatatagtgacaagagtccttagagattgttattcaagttccttagaaattgttatttaggtataatatcatcttgtctttgactagagcttgaaaccttgttatctgattgtgtaccactccaaattccctgccttctgcaagttgaatgtcttgctgaatgtgtctaggggttcatcttcagtaatcgacattccactagtgccatagttaacttcatgacatgtagacattcaaaacttgagccttggatgttcctgtggacctgacagttaaaaatataaagaacctaggattcaattccaactttctctgtttgccttgggttgaataacttatcttttggagaatagctttaagtggcttagacactgataaaattcagctgtgttgttgacgctcatctcttttgtcttacgcttagccatatttaaatcttgaatttaatagagtctagtgaaaaaaatgagtgggaagaatgaatataaaagtaataatataaggaaaaagggaaagtaaactatttagaatgtagttttgttatattcccagcatttcaatatttattagttacttgtaaattactgtggctgtgtagtttataaatgtctgtgcactatattaattagaagaccatagaacatgccagcaggttggctaatgctatgggggtttttaccacagttgccattgtggaagaaattatttggtacattaataaaaaaagttggtaaaacatggttttatacctcagtgtataagatgtgcaagacaaatatgcttatttccttttctagaatataagtgatattatttgcttatgacactaacactattaatgacaggagtcaatcagcctttacagctatcaaaatataatgagatcccaatgatgattcttttttactttgaatgttaattagtttgggactttgattggctggcaaacattttatcattgtcagaatttaatttagatttcaaaaatagcttacaggattttaaacatggtgtggtattctaaagccttttttttaaaaaaagagatctttttgagagaaacaaatgaggattgtaaagtttggggacttacctctgtagcattgtgaaaataaactttgattaagctgatttgaaaggaactcctactttgtggaattaaatctacattagagcactttatatggtaactatactcacaaaattttgcattataaaagttattatcattactttttaatggcttcttaacccgaccagtgtttatgactcactatcagtctggcactcaagtcttaccatactcttggaccttatgctacttctcaagccttacggtctacttgtgcttcagatgctgctgaactgtcaatagctctgtgatgttttctgtgctggagtgg

SEQ ID NO: 788 - DNA, 1498 bp, Homo sapiens
  misc_feature: Incyte ID No: 094712CB1
  unsure 211-212, 304-306, 409: a, t, c, g, or other
gtcctttgggacaggtggccaagtgcttggatcacaaaaacaatgagctggtggccctgaaaatcatcaggaacaagaagaggtttcaccagcaggccctgatggagctgaagatcctggaagctctcagaaagaaggacaaagacaacacctacaatgtggtgcatatgaaggactttttctactttcgcaatcacttctgcatcacctnngagctcctgggaatcaacttgtttgagttgatgaagaataacaactttcaaggcttcagtctgtccatagttcggggcttcactctctctgnnngggggtgcttgcagatgctttcggtagagaaaatcattcactgtgatctcaagcccgaaaatatagtgctataccaaaagggccacgcctctgttaaagtcantgactttggatcaagctgttatgaacaccagaaagtatacacgtacatccaaagccggttctaccgatccccagaagtaatcctgggccacccacacccctacgacgtggccattgacatgtggagcctgggctgcatcacggcggagttgtacacgggctaccccctgttccccggggagaatgaggtggagcagctggcctgcatcatggaggtgctgggtctgccgccagccggcttcattcagacagcctccaggagacagacattctttgattccaaaggttttcctaaaaatataaccaacaacagggggaaaaaaagatacccagattccaaggacctcacgatggtgctgaaaacctatgacaccagcttcctggactttctcagaaggtgtttggtatgggaaccttctcttcgcatgaccccggaccaggccctcaagcatgcttggattcatcagtctcggaacctcaagccacagcccaggccccagaccctgaggaaatccaattcctttttcccctctgagacaaggaaggacaaggttcaaggctgtcatcactcgagcagaaaagcagatgagatcaccaaagagactacagagaaaacaaaagatagccccacgaagcatgttcagcattcaggtgatcagcaggactgtctccagcacggagctgacactgttcagctgcctcaactggtagacgctcccaagaagtcagaggcagctgtcggggcggaggtgtccatgacctccccaggacagagcaaaaacttctccctcaagaacacaaacgttttaccccctattgtatgacctttgctgagggtatgtcctgctcctttccaccagtgatttgtattaagacagcacttatattgtacaatacttcagactgttttttttaaatacataaaactttatgttaaaaaactctattaacatggccaattggcatgactcctcttatgagggatgggggaggatgtccttgcacttaaactcattccatatgcatctgtgtgtgtagagggggcgggtagttttgaactctcagtgttacagcatcattaatggaactc

SEQ ID NO: 789 - DNA, 526 bp, Homo sapiens
  misc_feature: Incyte ID No: 994617.1
gagacacaagatcctgccctggagctgaaatgggcaccaggctcttcttctatgtggccctttgtctgctgtgggcaggacacagggatgctggaatcacccagagcccaagatacaagatcacagagacaggaaggcaggtgaccttgatgtgtcaccagacttggagccacagctatatgttctggtatcgacaagacctgggacatgggctgaggctgatctattactcagcagctgctgatattacagataaaggagaagtccccgatggctacgttgtctccagatccaagacagagaatttccccctcactctggagtcagctacccgctcccagacatctgtgtatttctgcgccagcagtgagtcccccctacaggggccgaacactgaagctttctttggacaaggcaccagactcacagttgtagaggacctgaacaaggtgttcccacccgaggtcgctgtgtttgagccatcagaagcagagatctcccacacccaaaaggccacactggtgtg

SEQ ID NO: 790 - DNA, 7823 bp, Homo sapiens
  misc_feature: Incyte ID No: 1251672.1
  unsure 7472: a, t, c, g, or other
gctcgctatataagccagccaaagttggctgcaccggccacagcctgcctactgtcacccgcctctcccgcgcgcagatacacgcccccgcctccgtgggcacaaaggcagcgctgctggggaactcgggggaacgcgcacgtgggaaccgccgcagctccacactccaggtacttcttccaaggacctaggtctctcgcccatcggaaagaaaataattctttcaagaagatcagggacaactgatttgaagtctactctgtgcttctaaatccccaattctgctgaaagtgagataccctagagccctagagccccagcagcacccagccaaacccacctccaccatgggggccatgactcagctgttggcaggtgtctttcttgctttccttgccctcgctaccgaaggtggggtcctcaagaaagtcatccggcacaagcgacagagtggggtgaacgccaccctgccagaagagaaccagccagtggtgtttaaccacgtttacaacatcaagctgccagtgggatcccagtgttcggtggatctggagtcagccagtggggagaaagacctggcaccgccttcagagcccagcgaaagctttcaggagcacacagtagatggggaaaaccagattgtcttcacacatcgcatcaacatcccccgccgggcctgtggctgtgccgcagcccctgatgttaaggagctgctgagcagactggaggagctggagaacctggtgtcttccctgagggagcaatgtactgcaggagcaggctgctgtctccagcctgccacaggccgcttggacaccaggcccttctgtagcggtcggggcaacttcagcactgaaggatgtggctgtgtctgcgaacctggctggaaaggccccaactgctctgagcccgaatgtccaggcaactgtcaccttcgaggccggtgcattgatgggcagtgcatctgtgacgacggcttcacgggcgaggactgcagccagctggcttgccccagcgactgcaatgaccagggcaagtgcgtgaatggagtctgcatctgtttcgaaggctacgccggggctgactgcagccgtgaaatctgcccagtgccctgcagtgaggagcacggcacatgtgtagatggcttgtgtgtgtgccacgatggctttgcaggcgatgactgcaacaagcctctgtgtctcaacaattgctacaaccgtggacgatgcgtggagaatgagtgcgtgtgtgatgagggtttcacgggcgaagactgcagtgagctcatctgccccaatgactgcttcgaccggggccgctgcatcaatggcacctgctactgcgaagaaggcttcacaggtgaagactgcgggaaacccacctgcccacatgcctgccacacccagggccggtgtgaggaggggcagtgtgtatgtgatgagggctttgccggtgtggactgcagcgagaagaggtgtcctgctgactgtcacaatcgtggccgctgtgtagacgggcggtgtgagtgtgatgatggtttcactggagctgactgtggggagctcaagtgtcccaatggctgcagtggccatggccgctgtgtcaatgggcagtgtgtgtgtgatgagggctatactggggaggactgcagccagctacggtgccccaatgactgtcacagtcggggccgctgtgtcgagggcaaatgtgtatgtgagcaaggcttcaagggctatgactgcagtgacatgagctgccctaatgactgtcaccagcacggccgctgtgtgaatggcatgtgtgtttgtgatgacggctacacaggggaagactgccgggatcgccaatgccccagggactgcagcaacaggggcctctgtgtggacggacagtgcgtctgtgaggacggcttcaccggccctgactgtgcagaactctcctgtccaaatgactgccatggccggggtcgctgtgtgaatgggcagtgcgtgtgccatgaaggatttatgggcaaagactgcaaggagcaaagatgtcccagtgactgtcatggccagggccgctgcgtggacggccagtgcatctgccacgagggcttcacaggcctggactgtggccagcactcctgccccagtgactgcaacaacttaggacaatgcgtctcgggccgctgcatctgcaacgagggctacagcggagaagactgctcagaggtgtctcctcccaaagacctcgttgtgacagaagtgacggaagagacggtcaacctggcctgggacaatgagatgcgggtcacagagtaccttgtcgtgtacacgcccacccacgagggtggtctggaaatgcagttccgtgtgcctggggaccagacgtccaccatcatccaggagctggaacctggtgtggagtactttatccgtgtatttgccatcctggagaacaagaagagcattcctgtcagcgccagggtggccacgtacttacctgcacctgaaggcctgaaattcaagtccatcaaggagacatctgtggaagtggagtgggatcctctagacattgcttttgaaacctgggagatcatcttccggaatatgaataaagaagatgagggagagatcaccaaaagcctgaggaggccagagacctcttaccggcaaactggtctagctcctgggcaagagtatgagatatctctgcacatagtgaaaaacaatacccggggccctggcctgaagagggtgaccaccacacgcttggatgcccccagccagatcgaggtgaaagatgtcacagacaccactgccttgatcacctggttcaagcccctggctgagatcgatggcattgagctgacctacggcatcaaagacgtgccaggagaccgtaccaccatcgatctcacagaggacgagaaccagtactccatcgggaacctgaagcctgacactgagtacgaggtgtccctcatctcccgcagaggtgacatgtcaagcaacccagccaaagagaccttcacaacaggcctcgatgctcccaggaatcttcgacgtgtttcccagacagataacagcatcaccctggaatggaggaatggcaaggcagctattgacagttacagaattaagtatgcccccatctctggaggggaccacgctgaggttgatgttccaaagagccaacaagccacaaccaaaaccacactcacaggtctgaggccgggaactgaatatgggattggagtttctgctgtgaaggaagacaaggagagcaatccagcgaccatcaacgcagccacagagttggacacgcccaaggaccttcaggtttctgaaactgcagagaccagcctgaccctgctctggaagacaccgttggccaaatttgaccgctaccgcctcaattacagtctccccacaggccagtgggtgggagtgcagcttccaagaaacaccacttcctatgtcctgagaggcctggaaccaggacaggagtacaatgtcctcctgacagccgagaaaggcagacacaagagcaagcccgcacgtgtgaaggcatccactgaacaagcccctgagctggaaaacctcaccgtgactgaggttggctgggatggcctcagactcaactggaccgcagctgaccaggcctatgagcactttatcattcaggtgcaggaggccaacaaggtggaggcagctcggaacctcaccgtgcctggcagccttcgggctgtggacataccgggcctcaaggctgctacgccttatacagtctccatctatggggtgatccagggctatagaacaccagtgctctctgctgaggcctccacaggggaaactcccaatttgggagaggtcgtggtggccgaggtgggctgggatgccctcaaactcaactggactgctccagaaggggcctatgagtactttttcattcaggtgcaggaggctgacacagtagaggcagcccagaacctcaccgtcccaggaggactgaggtccacagacctgcctgggctcaaagcagccactcattataccatcaccatccgcggggtcactcaggacttcagcacaacccctctctctgttgaagtcttgacagaggaggttccagatatgggaaacctcacagtgaccgaggttagctgggatgctctcagactgaactggaccacgccagatggaacctatgaccagtttactattcaggtccaggaggctgaccaggtggaagaggctcacaatctcacggttcctggcagcctgcgttccatggaaatcccaggcctcagggctggcactccttacacagtcaccctgcacggcgaggtcaggggccacagcactcgaccccttgctgtagaggtcgtcacagaggatctcccacagctgggagatttagccgtgtctgaggttggctgggatggcctcagactcaactggaccgcagctgacaatgcctatgagcactttgtcattcaggtgcaggaggtcaacaaagtggaggcagcccagaacctgcacgttgcctggcagcctcagggctgtggacatcccgggcctcgaggctgccacgccttatagagtctccatctatggggtgatccggggctatagaacaccagtactctctgctgaggcctccacagccaaagaacctgaaattggaaacttaaatgtttctgacataactcccgagagcttcaatctctcctggatggctaccgatgggatcttcgagacctttaccattgaaattattgattccaataggttgctggagactgtggaatataatatctctggtgctgaacgaactgcccatatctcagggctaccccctagtactgattttattgtctacctctctggacttgctcccagcatccggaccaaaaccatcagtgccacagccacgacagaggccctgccccttctggaaaacctaaccatttccgacattaatccctacgggttcacagtttcctggatggcatcggagaatgcctttgacagctttctagtaacggtggtggattctgggaagctgctggacccccaggaattcacactttcaggaacccagaggaagctggagcttagaggcctcataactggcattggctatgaggttatggtctctggcttcacccaagggcatcaaaccaagcccttgagggctgagattgttacagaagccgaaccggaagttgacaaccttctggtttcagatgccaccccagacggtttccgtctgtcctggacagctgatgaaggggtcttcgacaattttgttctcaaaatcagagataccaaaaagcagtctgagccactggaaataaccctacttgcccccgaacgtaccagggacttaacaggtctcagagaggctactgaatacgaaattgaactctatggaataagcaaaggaaggcgatcccagacagtcagtgctatagcaacaacagccatgggctccccaaaggaagtcattttctcagacatcactgaaaattcggctactgtcagctggagggcacccacagcccaagtggagagcttccggattacctatgtgcccattacaggaggtacaccctccatggtaactgtggacggaaccaagactcagaccaggctggtgaaactcatacctggcgtggagtaccttgtcagcatcatcgccatgaagggctttgaggaaagtgaacctgtctcagggtcattcaccacagctctggatggcccatctggcctggtgacagccaacatcactgactcagaagccttggccaggtggcagccagccattgccactgtggacagttatgtcatctcctacacaggcgagaaagtgccagaaattacacgcacggtgtccgggaacacagtggagtatgctctgaccgacctcgagcctgccacggaatacacactgagaatctttgcagagaaagggccccagaagagctcaaccatcactgccaagttcacaacagacctcgattctccaagagacttgactgctactgaggttcagtcggaaactgccctccttacctggcgacccccccgggcatcagtcaccggttacctgctggtctatgaatcagtggatggcacagtcaaggaagtcattgtgggtccagataccacctcctacagcctggcagacctgagcccatccacccactacacagccaagatccaggcactcaatgggcccctgaggagcaatatgatccagaccatcttcaccacaattggactcctgtaccccttccccaaggactgctcccaagcaatgctgaatggagacacgacctctggcctctacaccatttatctgaatggtgataaggctgaggcgctggaagtcttctgtgacatgacctctgatgggggtggatggattgtgttcctgagacgcaaaaacggacgcgagaacttctaccaaaactggaaggcatatgctgctggatttggggaccgcagagaagaattctggcttgggctggacaacctgaacaaaatcacagcccaggggcagtacgagctccgggtggacctgcgggaccatggggagacagcctttgctgtctatgacaagttcagcgtgggagatgccaagactcgctacaagctgaaggtggaggggtacagtgggacagcaggtgactccatggcctaccacaatggcagatccttctccacctttgacaaggacacagattcagccatcaccaactgtgctctgtcctacaaaggggctttctggtacaggaactgtcaccgtgtcaacctgatggggagatatggggacaataaccacagtcagggcgttaactggttccactggaagggccacgaacactcaatccagtttgctgagatgaagctgagaccaagcaacttcagaaatcttgaaggcaggcgcaaacgggcataaattccagggaccactgggtgagagaggaataaggcccagagcgaggaaaggattttaccaaagcatcaatacaaccagcccaaccatcggtccacacctgggcatttggtgagagtcaaagctgaccatggatccctggggccaacggcaacagcatgggcctcacctcctctgtgatttctttctttgcaccaaagacatcagtctccaacatgtttctgttttgttgtttgattcagcaaaaatctcccagtgacaacatcgcaatagttttttacttctcttaggtggctctgggaatgggagaggggtaggatgtacaggggtagtttgttttagaaccagccgtattttacatgaagctgtataattaattgtcattatttttgttagcaaagattaaatgtgtcattggaagccatccctttttttacatttcatacaacagaaaccagaaaagcaatactgtttccattttaaggatatgattaatattattaatataataatgatgatgntgatgatgaaaactaaggatttttcaagagatctttctttccaaaacatttctggacagtacctgattgtattttttttttaaataaaagcacaagtacttttgagtttgttattttgctttgaattgttgagtctgaatttcaccaaagccaatcatttgaacaaagcggggaatgttgggataggaaaggtaagtagggatagtggtcaagtgggaggggtggaaaggagactaaagactgggagagagggaagcactttttttaaataaagttgaacacacttgggaaaagcttacaggccaggcctgtgatcccaacactttgtggaggccaacgtggggaggatag

SEQ ID NO: 791 - DNA, 4564 bp, Homo sapiens
  misc_feature: Incyte ID No: 252493.19
ctcgggtccggatgtataaggcgcggccccctgcggggagtggtggtgagtccgagggtgccacagcggccctgcccctgcccctgcccctgccctgagtgggcgccgcgctacgggggaggggttaacccacccctcctccccggggcctcacgcgggtgggaagggacagtcccagcgacagaccaggcgcctggacgcgccgtggacccgcgtgcggacggcggggacaggctccggtgctgagcgcctccggtgtccccagcagcactgacccacttgcaggccccggagctgagccgccagccatggccgctccccgcgggagggccgcgccctggacgacgggcctgctgctgctcctagcctcgcaggtcctgtctccgggaagctgcgcggacgaggaggaggtccccgaggagtgggtgctcctgcacgtcgtccagggccagataggcgccgggaactacagctacctgcggctgaaccacgagggcaagatagtcctcaggatgcgcagcctcaagggagatgcggatctgtacgtctccgccagcagcctgcaccccagcttcgacgactacgagctgcaatcggccacctgcggcccggacgccgtgtccatccccgcgcacttccggcgcccagtgggcatcggcgtctatggacacccctcccacctggagagcgagttcgagatgaaggtgtactacgacggcacggtcgagcagcacccgttcggcgaggccgcctaccccgccgacggcgcagatgccggccagaagcacgctggtgccccggaagacgcctcgcaagaggaggaatctgttctctggacgatattaattagcattttgaaactggtacttgaaattctcttttgagtcgttgaccacactctgggatataaaaccctccatctgtgaagctgattgcagtttgctgtgaaccttgctacttgtacttggttgaagttctaggtacctttagtcaagggatggaaaaataaagccatacgcagttttgttacctcagttaccccaaaaataggaaaagcagcaagcacagtattttaaagatcataattcctataaaaggactgtgcacaaagtgtttagactccattttcattaggcaggttgactaaaaatgattgcagtaacaggtttatataaaatagagcaacctttcatgctgtgacacaaatcaaaaggttgataactttgtaattttactctggagattctaaccgaagttggtgtaagttttcaagagttactaaaatcaagttggaaatgatttacgtacacttccctgagcctggactaaagcctcatgcctgtaccccaagtaggtgatggtacttttctatacaaaaaggatttcctggcaggcaggtatttacaaagtttgttcctgtaccagtccaataatgacaactctaaatccagctgcaccaaatcttagtgggccatttgtcatacctatgaaaattcttcagttattaaataactttgtcagtgctacctatggtaggccggaaacaatgtagattaggaagtttcatgaaaattaacttttggggctatggagaaacagttaagtatcttaagttactaaacatttccactgaatttttggagtgagccaaggttactataaaatactttgggaagatgaattctctacctggagttagtttcgagagtaagcgtagcttttaacagaaataactgcagattttaagctcataatttgcaaaaaaaatcttttattggcatgaaaataatgttgtaaatggcaccaaatattccacttaaatgcatatacagtattagagtcaaaaactattttatccctctttgctgtttttcccccttctgcccactttcctgggtgttgggggggcccgctgacaacagtcacaaatccagcgacctaggaaaaaaattgttaatatagaatgaaaaattatctttacaggactgaattttaagcccatctaaactcttctgccttagctatcactaatgatattcctctctggattttgtggtgagaagggcactatgagttccttaatttaaggaaaaaatgtaaacttaatcaatgtaatcaatgccatgcaaaattcattgcaagtcaagggggatgggagagatgcaatgccatacggtgatacggacctttaagaaagtacaatctttcctgaaattcaaacactatcatacttcaaaaggtcaaaacccattccggaatttggcttttttaagactttttctctcctgctcactggcagctgtgtgtcttaacagcattctttcaagtcctggtgtactctgctgacagcactttaaaactttaacagcacaatgataacttgtactacatacttgatctgaattactacagaaaaataattatgttgcttgcttaatgattcccaggaaacttcgttgtaggcatatattttataagagtattatacagtgttaactatgcaagtaagttctaaaattacacaattatctgtgtaatgttttagtccaattactgtgatttattcaactctgttctaaagttatctggaattgtcatgctgcctcaatttacagaaatctataatagatttctatagaaatgtataaagacgtagcagtcattttgttgtttctaaatagataacatataaaaataaaggctttgttactttagtatttcagtagaaaaacaccagctcattctatagaactatacttccaaaacttagcaggggcattctggcctttcacttatcctttagttggaattgtctagggatgaaaagctggtggacatgacctgtataatcacagctttggtcgtatttgcacataagagtccacaagctcttcatgtcatgatagcgtttatgcagccttttggagtgctgggagagtctcatcacccaaagataatgtttgctctttttttaatctttacctgatggaatagcaccaaggcccacacaaaaagtatgataacctctgtcacacatatcacagaacatcatttcttcttcatggtggggttgtccacatataatgcatgttttacattccatacactgccatgggtaggtcttaatcatagaaacaagctccattgtcatatccaggcaagaaggatggcctaaatcaaaaccagtattagtggtatctcacataagaaattttaacttaatatggcacataaaatactagtttgctttaggacttccagagaatggctataatgtcaaatcgccaaagagaaatgaatatacaatgtagaggaaaacacatgggctgtgtctatgcctcacaagctaccctgtgtatttaatttggtgactctttggttgaaatctgcctgaaactataaattctagtttttgaaccaataaatacggtggttaaaattttaaaaagacatttcaatacttaccactattctcacattgggagcagtgtataagtgattcagcctttcctttcttgttggactccttacccttcagacaaattccacatatagcatttggaatgacctttggctggaagggtagaagagggctataaattcatgccagaagagcttactatgggtttaaaaggaattctgttactttattgccctatttttacttttggtaacttgctaatgaggaccattttgaaagacaaaacttgacaggagtctgcctacaatgtaagactgcctactgaagaaagcattaatttcatcataaaatttggtaaacagcatgatctcgtaagattaaatgtagcattctatactccctacatgcacagtaagatttgtttaatgaatggaaggaaagactaaatacaatgtcaaatgtcactattaattggacaagaaaatccaagtagcaaatgaccattatgtgtaagacttactctaaaaagaccattttaaatagctcatatattaattttgtttaaaacctgctattttccaaaactgcaaaactagagctataaaatctaagttaaaaaatcagcttatcctcattggtatagtggtatttaaaaaaaaatcagtttaaacatttttaattgaaagatgtctcatgcatacattggcgtgtacataaacgtttgtggaaaacttagttgtgtgattattctctttgcatgtctaataaaagaatctatacttagaaagattcactataaaatgtaaaattataaaagggaaaaataagttttcagacaagcaaaaaaaaattgcagtcacttaaaaaatacacgaacactctgagtactactgatctttcagattaaaaacatgcatggtccagtgaaggtgtctgaattttagacatatttggttacacatggaaatgacaaaggaaaaagggttcactgcacttaaaattaccaggggagggagggcatccgaacgtcacggtcttgactgttacaaaatgacgttcactcatgctatagaaataagtaaataacagtggtaaaaaaggaagagcaagcatgggccaagaatgaaatggggtaaggggaca

SEQ ID NO: 792 - DNA, 1272 bp, Homo sapiens
  misc_feature: Incyte ID No: 1397659.4
gcacactgtcgattggctcttagagcatatttttaatacaaaatctgtctttgtgaatagagaatagggacgtattttttaaaattgctaccaatcccaaggagcaaggagcatcgatgctttgacttttctgcagggcaggtgacttggcctagctggttttgggtggtgagtgcagtgagtgggccatgacacagtacacgccatgttcacctgtttcccaaaatgtttaggtttttcccctccagtaaatgtgactgtctctccccgttctgaagaaagccatacaacgacggtttctggtggcaatgggagcgtgttccaggcgggcccgcagcttcaggcactggctaacttagaagccaggagggggtctataggtgctgctctctcatcccgggatgtcagtgggctgcctgtttatgctcagtcaggagagcctaggaggctgacccaggcacaggtggcagcgtttcctggagagaatgctttggaacactcttcagaccaggacacctgggacagcctgaggagcccgggtttctgcagccctttgtcatctggtggtggagcagagtccctgccgcctggggggcctggacatgcagaggcaggacacctcggcaaggtttgtgacttccacctgaaccaccagcagcccagccccaccagcgtcctgcctacagaggtggcagcccctccgcttgagaaaattttgtctgtggatagcgtggcagtggactgtgcctacaggactgtgcccaagccagggcctcagcctggcccacatggatcactattgactgaagggtgtctcagaagcctttcgggggacttgaaccggttcccctgtgggatggaggtgcactctggccagagagaactggagagcgtggttgctgtcggcgaagccatggcttttgaaatttccaatgggagccatgagttactgtctcagggacagaagcagatttttattcagacttccgatgggcttatcttgtcccctccaggtacaatagtgtctcaggaggaggacattgtcacagtgactgatgcagaggggcgtgcctgcggatgggcccgctagaaggagttcctctagaagctgtggagtcggtcgtcaccgcgagagccctcacagtgaagtggagtcagatcctagattcgtctgattttatccagagaaggtctatggcaagcaatgtatatttttctaatgtgaatattgcacagatgaaccttttatttataaagaataatgtctttctg

SEQ ID NO: 793 - DNA, 1892 bp, Homo sapiens
  misc_feature: Incyte ID No: 2812002CB1
ggtccagtcctctgccactctcgctccgaggtccccgcgccagagacgcagccgcgctcccaccacccacacccaccgcgccctcgttcgcctcttctccgggagccagtccgcgccaccgccgccgcccaggccatcgccaccctccgcagccatgtccaccaggtccgtgtcctcgtcctcctaccgcaggatgttcggcggcccgggcaccgcgagccggccgagctccagccggagctacgtgactacgtccacccgcacctacagcctgggcagcgcgctgcgccccagcaccagccgcagcctctacgcctcgtccccgggcggcgtgtatgccacgcgctcctctgccgtgcgcctgcggagcagcgtgcccggggtgcggctcctgcaggactcggtggacttctcgctggccgacgccatcaacaccgagttcaagaacacccgcaccaacgagaaggtggagctgcaggagctgaatgaccgcttcgccaactacatcgacaaggtgcgcttcctggagcagcagaataagatcctgctggccgagctcgagcagctcaagggccaaggcaagtcgcgcctgggggacctctacgaggaggagatgcgggagctgcgccggcaggtggaccagctaaccaacgacaaagcccgcgtcgaggtggagcgcgacaacctggccgaggacatcatgcgcctccgggagaaattgcaggaggagatgcttcagagagaggaagccgaaaacaccctgcaatctttcagacaggatgttgacaatgcgtctctggcacgtcttgaccttgaacgcaaagtggaatctttgcaagaagagattgcctttttgaagaaactccacgaagaggaaatccaggagctgcaggctcagattcaggaacagcatgtccaaatcgatgtggatgtttccaagcctgacctcacggctgccctgcgtgacgtacgtcagcaatatgaaagtgtggctgccaagaacctgcaggaggcagaagaatggtacaaatccaagtttgctgacctctctgaggctgccaaccggaacaatgacgccctgcgccaggcaaagcaggagtccactgagtaccggagacaggtgcagtccctcacctgtgaagtggatgcccttaaaggaaccaatgagtccctggaacgccagatgcgtgaaatggaagagaactttgccgttgaagctgctaactaccaagacactattggccgcctgcaggatgagattcagaatatgaaggaggaaatggctcgtcaccttcgtgaataccaagacctgctcaatgttaagatggcccttgacattgagattgccacctacaggaagctgctggaaggcgaggagagcaggatttctctgcctcttccaaacttttcctccctgaacctgagggaaactaatctggattcactccctctggttgatacccactcaaaaaggacacttctgattaagacggttgaaactagagatggacaggttatcaacgaaacttctcagcatcacgatgaccttgaataaaaattgcacacactcagtgcagcaatatattaccagcaagaataaaaaagaaatccatatcttaaagaaacagctttcaagtgcctttctgcagtttttcaggagcgcaagatagatttggaataggaataagctctagttcttaacaaccgacactcctacaagatttagaaaaaagtttacaacataatctagtttacagaaaaatcttgtgctagaatactttttaaaaggtattttgaataccattaaaactgcttttttttttccagcaagtatccaaccaacttggttctgcttcaataaatctttggaaaaactcaaaaaaaaaaaaaaa

SEQ ID NO: 794 - DNA, 905 bp, Homo sapiens
  misc_feature: Incyte ID No: 407899.1
  unsure 493: a, t, c, g, or other
cttgtcacttacagcagccgaagctaccagaccaacacagcagacacaggtgcaaggcctgggtggagagacgggcaggctgggcaaacagagaagaaccagaaaggctggagtgggcaaatggcagagggcatgggaggcatctgggctatggccagagctgtccagccacacaatgggtgcttcaactggaccagcagggccagagggagaaagggggcctttgttcatctggggctggagcaggccagagggaaacccgagccttgggtgtgtctcccctttaggccaactgtggggggccccaggaagagacttgtctaaggagttagaagactatattcccaacccaccccttactagagggcaaaggtctttactttcctgtagatccctatttctcttcctagctttatagtaggcctttatagccctctttgcttctcccctttagctggtttgttgcactaagtttgcttccaccttaggggcnctttggcactttcctattttcctcagcctggaagtgctccttccccagatttttgcagactggcttcttcttgtcatttagatctcagttcattatgcctcctcttcactatcacattacttgtttgtcttattttccactctatacttacctagtatctgtattttttaatttacttagcctggcacctagactgactaggttgcctatccagttttgttgcttaatagttgtgtaaatgtggcaagttacttttctgtgtctcagcttttttttctgttgtaggaatctacttaatagggctatcatggggataaaatgagtgcatatatttaaggtaattttttaacgggtctggcacatagtaagtgctcaataaagattagcttttacttaaaaaaaaaaaaaaaaa

SEQ ID NO: 795 - DNA, 1253 bp, Homo sapiens
  misc_feature: Incyte ID No: 235056.24
  unsure 32: a, t, c, g, or other
ttccacttggagagaaaaaggcagcgcaagcnaagagaaacagatgtccgccaattccaagcacaggcgtttactgaagcatttgaaagggaactaagaagacataaagttcaagagaatattggacctctaagaatacatgagaaggaggaggaaacagtgggaaaaaatatacagaggagaagctgttcgtaaaggaactccagaatgtagtcagccctggaagatttactctagaaaaaccacaacgcagagtctaagaggtggcctcccaaagccaaataaagcagttccaatgaaagtaagtgaacacagtctcctgccccttatgctggagcagtttccgtttctttatgtttctggcccaacactaagcaaaatgtggaaacagcaaattgcacaggttgaacagcttaagaaagaagcatgtagagaaaatcgatcaaagaagaaactccaagatgaaatagaagaagccctaagaaggcatgacctccttactacccttgtcaagaaagaatatgaacataacaagagactgcaagacttcaaggactgcattcgtaggcaaaggttgacccaatcaaagataaaagaaaatcgacagcaaatcgttcgtgctcgaaaatattatgatgattatagagttcagttgtgtgcaaaaatgatgagaatgaggacccgggaagaaatgatatttaagaaactgtttgaagaaggtttaaacattcaaaagcaaagattacgagacctaagaaactatgccaaagaaaagcgagatgaacaaaggagacgccaccaggatgaactggactccatggagaactactataaggaccagttttcattgctggcagaagccatatcacaggaacatcaagaacttaaagccagagagaaatctcaggcccagacattacataaggtgaagagggagctgagatctaagatggagaaggaaattcagcagctgcaggacatgataacacagaatgatgatgatgttttcttccgggaactggaagctgagcgcttcagatctcggcttcagctggcttcctttcagtacagtaaaagtccctccctatgaggccagacttgataatagtaggtgaaggttctggaggcctttaccaggacagagctagaatcgagccagtaaacagtctaagccagaaaaataattttcaaatgctttacctgtattttcattccagtactttttatgattttttaaataaaaattgttttct

SEQ ID NO: 796 - DNA, 3691 bp, Homo sapiens
  misc_feature: Incyte ID No: 234196.3
cgcaccggaaggctcccagccccgcttcgtcgcagcggcttgggccctccggccctccgtagccgctcgactgtcgcgctgcaccagcttcctcctcgggcgttcccacgcctatttgggcggattcttggcgccggaggaagaggcagggtcaccctctctccacgtcagagacctgactgtggagatggcggctcagaagataaacgaggggctggaacacctcgccaaagcagagaaatacctgaaaactggttttttaaaatggaagccagattatgacagtgccgcttctgaatatggaaaagcagctgttgcttttaaaaatgccaaacagtttgagcaagcaaaagatgcctgcctgagggaagctgttgcccatgaaaataatagggcttacttccattcagtctttttcatgctgccaaagcttatgagcaagctggaatgatgttgaaggagatgcagaaactaccagaggccgttcagctaattgagaaggccagcatgatgtatctagaaaacggcaccccagacacagcagccatggctttggagcgagctggaaagcttatagaaaatgttgatccagagaaggctgtacagttatatcaacagacagctaatgtgtttgaaaatgaagaacgcttacgacaggcagttgaattactaggaaaagcctccagactactagtacgaggacgtaggtttgatgaggcggcactctctattcagaaagaaaaaaatatttataaggaaattgagaattatccaacttgttataagaaaacaattgctcaagtcttagttcatctacacagaaatgactatgtagctgcagaaagatgtgtccgggagagctatagcatccctgggttcaatggcagtgaagactgtgctgccctggaacagcttcttgaaggttatgaccagcaagaccaagatcaggtgtcagatgtctgcaactcaccgcttttcaagtacatggacaatgattatgctaagctgggcctgagtttggtggttccaggagggggaatcaagaagaaatcacctgcaacaccacaggccaagcctgatggtgtcactgccacggctgctgatgaagaggaagatgaatactcaggaggactatgctagtattttgcttgctgaaaagaaaagggaaacaaaggtaaaatcctgacatgccatttcaaggacttgggaatagattagggatatccgtacttcattacagtcatgattttggatcctaataaagactagtttttagttaccatcttcccaaatcactcattgtatccattacctgtgaagcatatctttttctttccataagagcttttctaagacaccagcaggaattaacagaaaatgtactgtcatgttttaatacattgattaaaaaatttgcaagccaaattatacataaattatgttctaaacaaaaggggtaataagcataggtattctctcttggacacttgtaagttactgttagtgaattgttttttacgtttcatttaataattgctgctaaaggtgatgtttactgataaatcattttaaaatttttttgttttgaaaagtaaatttatcccccatgatgttagatacatttaaattattaagtcttttcagagatgagatggggacaggaagttattttgagccttacaatattatttagcccaataaaagatgcattgaagctcttatatattatgagtttgaaaaattttgaaggtagcatattgaagtgatctataaatatcttcagtcctctctgaagtgtgggtatttcttctatctaaaaaatacatacagtgactgtcttcaaatctacttggttcttgaccaaataggagctaatgggtaatgaatacccttttgtttgtttgtttgtttgttttgttttttgtttttttttttaagggtctcactcttttgcccaggctggagtgcagtggcacaatcacggctcccaggctaatgtttttatttttaatttgtaattttttttttattttttttgttgagatggagttgctccatgttgcacaggctgttctcaaactcctaagctcaagccatctgcctgccttggcctcccaaagtgctgggattgtagacataagccacctcacccagcctatgaatatctttctaacattgtaagaatgaggtaatgtttccatcagtctaatacagatatatttcttccctccaaaacagtttattttgattgtttattttattttgattgtaactccgtcataacttgacatggaaaatgctatatactatgaaaacttagctgaaagggaagaattgttttagaaagacaatatttaaaacaccgcactgccaatatattgatcctttatagttatttcctaaaatgctgttttcgaaacattcctttttcaccctgttgtgtggcttagacccatctcgtaatctgttaattggaaagaggctacagacaccagcagtgtgcgttctgcaggtacacgctgccaaagtaattcctgctcatccatgccctgtctctgtctcttttagagtcataccttatttgagtataggttgcttaattttgctagacttcctgaaaacactaaggtggagtatcagaagtgattttagtcacagttctgcgggagagcttagaataacatcctcctttgggaggtggtctcgggtgcgtggatgttggtatacagtctttattgtaagtctgatacaaaatgctaataaatttaatgtttttcttccttaatttattggcatagttcttcaggtagcacctcatttttattaatgatattgggattaactatgaacaagctatatgtagacatttgcatttaaggacattgcagtgtttcaaagatcccatcattgcagcttgtatcctttagatccaatcggaaacttctggagtcttacattaatgctcatttgagctaattagtaatctgtttaaacagatttggcaatactttaaagatactgtagactatttatgtatagatagatcatattacccattaaagtctgggggaaaaaattttttaattttactcttcttatgtactgaaaactttttttaaaaaaggtgatgatgaagtgcattctgtagcagcagcgcagctatgctttaaaccacacaaaaggctgtgtccaggtgcagcctccttcacccttcctgcccacggtgaggattgaataaccaggacttggggatattgtttgttgtcagggttattctgtgtggtaaggaatatttgtttcacatttatacattttctttttccactcacgtaagtttctatcttgagagcatagtccaaagtgcaaaacttggtgtttacaaggaaaattgtcttccagaactccactgtcatcactttcaccaaagtggaagtttgcatgaatatgctcagaatctaatattcaatgttctgttacattgtaagtgaagtccagctacaaaatagatttaatatattgaatttatttgtacatatgcagagtacggtatttctgtatggaatctgctttattcctatttttcccaactctgatgagtagaatattaaatgtgttgttatggaaatacagattattgcttctataggaagataattatgaaaataaaacctgaaactatataaatataaaa

SEQ ID NO: 797 - DNA, 1211 bp, Homo sapiens
  misc_feature: Incyte ID No: 003105.1
  unsure 87: a, t, c, g, or other
ataatcctagaaaactcacaaaatgtgtgatgcttttgtaggtacctggaaacttgtctccagtgaaaactttgatgattatatganagaagtaggtaaggaaatgcgttgtggaatgactggatttataatattttcttttgggaaaaagagtttacagctgtgtttatagcaatgtctggaagccctggccagaaatgaaaaatgctgctttctatagagaggctgcacacatagcaagtgataatcatttgtttctagagaaattctgaaccaaagctacaactaatgtttcctaaaggtgtaccaatataaaaaggtgtctaaatggaatgtttattgtctttagaaatgataagatttgactttatttgaaaaacttgggtatccttggtttacttagctctttgcctgtttctctttcatccccttttgcatgtaaattaagcaataacttggaaaaaagttagtatgcaataattttcatttcaaactgaaagcactctagttcccttaatgcaaggttctttttcagtaaccgtatgttagccaattattttcttgtctcaatgttaatctattaaaatatgtggttgttttatgatagacaaaaattttaatttcagaaaatatgtttcttaaatggcttaaatacttcctttgactagaaatgacatagtatgccatagaattatcaaccaatttaaaaggagaatgttacgcatataacatacctcttctttgatagtagaggtttttaattttttagacgctgttaactgtcagcatgtcattggatgaatgtctctcagataactatggaggtaaatcagaaaagacaacttctcactcaggcagcttctactttgaaaacctttctccctcaaccccatgcatgacagtccaataaagtcagaactggggttagcaaactggggaggaattttatgcaatcttagggtttagaatgtaatcattaaatcgcaaaacacttaaccctcctgtaaattatacagtatatatttttttgcttgtctgtaactatgtttcttgtttttagatgatagggaaattggtgacttcagcatgagagagactttctagaataaactagagtgattcaataaactaattaatatgcactgatgcagaaaagccaggatttggggccatttaactatttatttttagaaaaatgttatacttctaat

SEQ ID NO: 798 - DNA, 1495 bp, Homo sapiens
  misc_feature: Incyte ID No: 981269.1
  unsure 343, 347, 349: a, t, c, g, or other
gggggaccaaatcttgtttatttcaggaatgcctggttggtttattattagaaacccaaataatgtaatttagcattttaactaataaatgagaaaaaagcatatataatagatacagaaaaagcatttcaaaaaattcagcatccatgattattttaaaaacttatggtaaattaggaatggaaggaaacatttttaaactgataagtggtatttactaaaaacctgcagcaagcatccacttaatgttgaattgctcaaagtggtcccttgagttcaggaataggacaagaatgtctcttctcactagttgtactctaggtcccagtcgatgcagtaaggnaagnanaagactgtatctggattgggaaagacgatctaaaactaccatcattcacagatgacatgcttgtgtatgcagaaaattctaaggaagctacagattaaaattattaagagattagcaaagtcagtgtacaatatcaacatcaaaagaccagttatatttctatataccatcaacaagcccttagaaaatgaaatttaaaccaatatttaatttatagtagtatacacaattaccttgaactaaatgtaataatagacgtacaaaacctcaagcaaaagttatgaagctttgttgacaatgtcaagtgtttgtgaggatgtggagcaacaggaactctcaaacattgatggtggaagtgggaattggtacaactttgatatacagtttggtggtatctagtgaagttgaaaatatacacaatctatgagccagcaattcctctcctacatatataccttgtgtgtgcacatatgtaccaggagacattaaaaacatgttcttagcaacatttttcataattgtccccaactggaaacagtccaaatgtccaccgacagtaaaaggataatttcttgtaaagtcgtagaatggaaagctgtaacacaatactgagaatgatgaaccgatgccgcatgcaaccaggttgaatctcagaagcataattgtaagggcaatgagctggatatagaaggatatatgcattatagttctatttatataaagctccagaaacagtagtgtttgggcatctatatttgagtggtaaagctataaaggaaagtaagaaagcaacagctaaaactgtcatgagagtgttttgttttgttttggagagaggaaagaggttgtgattgggcaaggacttatgggaatttctggagttctgatctgttctgtttcttgatctttatggtgatttgctttataataatttgttaagctgtaaatttatattttatgcactttcctctgctccccccgccccccgcttaaagagtgttttagaatgtggaaattttaagataagatctatctcagggcttgttgtaagaatgaaatgaagtataaagccatgtagagcttgtagaatatgcctggcactttgtaagaccttaataaatgttaactatctaaacacaaaaaaaa

SEQ ID NO: 799 - DNA, 2645 bp, Homo sapiens
  misc_feature: Incyte ID No: 233931.2
tggagcccgacgcggcggcggcgacccccgcggctccgagtccagcgtctctccccctggctcccggctgtgcgctgaggctttgtcccctgtcctttggcgaaggagtggagtttgaccccttaccaccaaaggaagtaaggtacacctccttggtcaagtacgactccgagaggcacttcatcgacgacgtgcagctgcccctgggcctggcggtggcctcctgcagccagacggtcacctgtgtccccaatggcacgtggcgcaactacaaggccgaggtgcgcttcgagccacgccacaggcccacccgcttcctcagtaccaccatcgtgtaccccaagtaccccaaggccgtctacaccaccaccctggattacaactgccgcaagacgctgaggaggtttctgtccagcgtggagctcgaagccgcggagctcccgggcagcgacgacctctctgatgaatgctgacccagcaggctgggctggggtcggaccggctctcccgctgtcctgcccccgactgccctggccaagctgggcgaccttacccttcacgtcattccagccccagaggagtctaacctagagatacctccaagcgcggccgggggaagagaaaaaaaagaaaaaatcactgcatctcataattattgagatctttgtgttgtaattttcaagctgtttttagagggaatatatgtcctggtttgctgctgtgttgtttccccaaagtctcaatcagatgaggcaacaaaaagaccaccagaattgcaggaaagcagcagcagtctgggatagggaggggggaggagagctctccctccgtggtcagtttgtcagaagaaaagcatggaaaaagtgagatttaagaaatctcagccacgggtgtcttcactgcacaaaagtggtgctaattcagtaaacagtgacacctgtgtgggttcaatctgtggagagttgagttccattcctttgtttttaaatttccacctccatctctaaaaaaaagtggcaaagctgaggaaatctgtgcccccatcccccgacaccagacaagctaaggtgcattcagagtagggaacgatgtcaaaacctggccgccgtggtggcgcgcattcctctcacaccaccgtacggaggcaggtgacagtcaactgaaatgtccccaaggaccgtgtgaattcggctggcgtggcccagcagcggggtggaccagggtgcggtggcttcagacctgcctcccgccaccccgtcctcccctaaccccttcttgggacctcctgccaatccctgtggtgtttgagtaaagaaagtggctgatggttttacttttttcttccaatattggaaagaacaaactagatattccccttgaacacatccaaattatttccagtgcctgagggttaccgagcactgtaagctcagctcggctgtagctccgggtttctgccgatggcctccatctgcgccgaaagctgaactgagccccgcggtgccccggagccacagcagcaggtgcagcgacaatcgccgtcgtgcgcagtcgctggagtcctggagagccacgctgtcctctgcagacaacagcatcagtccgctgtgccccaatgcatcgacgccctgtggacggggcctgcagtccacccgtggtctgagcttgccgggctgaagctcggctgggacccagggaggggccaccctgggacccacagtctcctcagtcacgtgcagagcaaaaaatgcttcctgtgtttggaagagcaagtgacgcagcatttattgataaaaatggatttttctgtctgatttcatgctgtggtcgtttaagtggtcaatgtctttttttttttttttttttgacatggagtctcgctctgttgcccaggctgagtggaatggcgccaactcagctcactgcaaccttcacctcccaggctcaagcgactctcctgcctcagcctcctgagcagctgggattacaggtgcccaccaccacgcccagctaatttttgtatttttagtagagacggggtttcaccatgttggccaggctggtctcgaacacctgaccttgtgatccacccgctcggcctcccaataatttgtaagttatgttagcgggatcctcaaggccttgctctgccccgtggagacgcttgctcggatgagctcaggaaacagtaccggctgcgtggcaggtctgggtgttgtgtgcgaggacgtggcctttgcacaccgctgtgttctcagaggtccttaggagatatttttttttgtcttagggggactgtgttaagttcagacaaatcatgctgggtgtggagagagtctgaaatacgtcagtgaagtaagtagcagtgagcgattgtgaatgtgtaatgtaaatggaaaaccgggttttaccgtgttaagttattcactagggagccagtcgtagttctttgtaatcctctttcttccaaacctgctttgctgaaagttgcagaaaaggaagtgtgtggagagaaacagaacccttcagggtgggtcagaggacgccatccacagtggattcgtgttcgtttgcaggtggaagcagtgatttttaggacccactgattaaaaacaaacattcccaagtgtctctgagagatgctg

SEQ ID NO: 800 - DNA, 3202 bp, Homo sapiens
  misc_feature: Incyte ID No: 235056.23
tttggttcgtgcgtccgcgccccagtgtcgggtctgcgtggatcggtccttccaggacaccgtcgccttcccggccgcgtcggagtccggcggcgacctgcctctgaaacatggcaggctcggatgctgagtgggtaaccattgccaataaccttctttttaagtgtcatatacatctgagaatacatgaacttcaagactgtgatgctaatgtttttattgctctttatcagtctattttgggagaaaaggtaccagacctcatagttattcctaggagtcaagaagatgatgcacacaatgtacaagcagtaattgattcactggccttggactacttgcaggtcagcttgtctcacataacaggagaaaatatagtgaaaggagataaagaatctattaagaatctcctggaaatatttgatggtttgttggagtatcttacagaacgcatcagtgaaacatctcatgagaaaagtgaaactgaacagtattttaaagaatctgatcgaggagaacgtttggaagagccagaaagtactaaagaatctaaatcatcatggaaaagagtttcttttgggaggtgctccttgtcttctgagatgttgggcccctcttgggatggagatgaagcagaatccactggtgaaatcattagacttggagacacagcacacaccttttctctaagaagtaatggtgctcaatgtcctaatgaaatgctgtctaaaaaagccttagcctcaccaagttctaaatcacatgaagatatgttgtaccctcctagtgttttgtccaagagtaggacatcctttgttgaagacacggaaaccctttctgtgagtgggattccaaatgctaggaagctaggggagcctatccgagcagctattcctttacatccaccctaccacccttcagagcctcgagcaccctgccccataggaaaagaatacttgcattcaagtcactgctccccagccgtaaattctactggagagcatacggaattttctggggatctagatgatggacttttcttaatttccaagttgcctaaaggcagcaaatgggaagtatatccagctcaggtccaagggcctaggacaaggaagcctcccaaaggaaaaagaaatgaaaacagagctacagcctcatcctgcaattcacctttcccccagaggccaagaaagagattaacagaacaagaattacatgatgtatcagaaaaactctctcagcggctttctgaactagattggatgttaaaaagtgctctgggtgatcggattaaagaaaagactgaccataaagaagaaaatactggaaatgaggaggtagaggatggaactgaggagacactgtctcagcacagtgatggcatcgtggagtatgggccaaagaagtcaaggccaggactttccatgcgtagaaagccaccctacagatcccattcgctctctccatctccagttaacaaacacaaacagttccacttggagagaaaaaggcagcgcaagccaagagaaacagatgtccgccaattccaagcacaggcgtttactgaagcatttgaaagggaactaagaagacataaagttcaagagaatattggacctctaagaatacatgagaaggaggaggaaacagaaaaaatatacagaggagaagctgttcgtaaaggaactccagaatgtagtcagccctggaagatttactctagaaaaaccacaacgcagagtctaagaggtggcctcccaaagccaaataaagcagttccaatgaaagtaagtgaacacagtctcctgccccttatgctggagcagtttccgtttctttatgtttctggcccaacactaagcaaaatgtggaaacagcaaattgcacaggttgaacagcttaagaaagaagcatgtagagaaaatcgatcaaagaagaaactccaagatgaaatagaagaagccctaagaaggcatgacctccttactacccttgtcaagaaagaatatgaacataacaagagactgcaagacttcaaggactgcattcgttaggcaaagtttgacccaatcaaagataaaagaaaatcgacagcaaatcgttcgtgctcgaaaatattatgatgattatagagttcagttgtgtgcaaaaatgatgagaatgaggacccgggaagaaatgatatttaagaaactgtttgaagaaggtttaaacattcaaaagcaaagattacgagacctaagaaactatgccaaagaaaagcgagatgaacaaaggagacgccaccaggatgaactggactccatggagaactactataaggaccagttttcattgctggcagaagccatatcacaggaacatcaagaacttaaagccagagagaaatctcaggcccaggtaataattaagatagaagccaagtcatgcactgcatggcaatgtttctttcagcaagggacctcgtacattggtagttggagcaataggccgtatcatatagccccggtgtggcagtggactgtactctctaggtttgtgtaagtacactgacattttgcacaacaacaaaatcatttaatgatgcatttcttggaacatatctccatcattaagtgacacatgactaatttacatttttaggaagtagaaaaccaaatgtattatacctgtaaagggaatggagagaagactaataaggcaatccatctatgacccaagacatttttatcctatgattttaactttagttaggtctctgtaagagctgctgttgctagattattgaaaattttggaggagtttgattagctggaagatggagagggaacaatagatgagggcctggataaatgctgtgaacagcgggatgacatgccttcttttttcagacattacataaggtgaagagggagctgagatctaagatggagaaggaaattcagcagctgcaggacatgataacacagaatgatgatgatgttttcttccgggaactggaagctgagcgcttcagatctcggcttcagctggcttcctttcagtacagtaaaagtccctccctatgaggccagacttgataatagtaggtgaaggttctggaggcctttaccaggacagagctagaatcgagccagtaaacagtctaagccagaaaaataattttcaaatgctttacctgtattttcattccagtactttt

SEQ ID NO: 801 - DNA, 1800 bp, Homo sapiens
  misc_feature: Incyte ID No: 415044.22
  unsure 774, 776: a, t, c, g, or other
ctgcatgataagcaccgagaagtccgcgtgaagtgcgtgaaggctctgaaagggctgtacggtaaccgggacctgagccgcacgcctggagctcttcactggccgcttcaaggactggatggtttccatgatcatggacagagagtacagtgtggcagtggagtccgtcagattactgatacttatccttaagaacatggaaggggtgctgatggacgtggactgtgagagcgtctaccccattgtgtaggcctctaattgaggcctggcctctgctgtgggtgaatttctgtactggaaacttttctaccctgagtgcgagataagaacgatgggtggaagagagcaacgccagagcccaggtgcccagaggactttcttccagcttctgctgtccttctttgtggagagcaagctccacgaccacgctgcttacttagtagacaacctgtgggactgtgcagggactcagctgaaggactgggagggtctgacaagcctgctgctggagaaggaccagagcacgtgccacatggagccagggccagggaccttccacctcctagggtgaaaccaggagagattgcttgcttcacttgtacaaggcaggaacggtggcatggggtgggggaaacttggagttggaaggtggctaatctttgattctatgtttttgatcctcctggcactccagacctgggtgatgtgcaggagagcacactgatagaaatccttgtgtccagtgcccagcaactcctgcctcagcctcccganantgggactacagtgcccgccaccacgcccggctaacttttttgtatttttggtagagacggttttcaccgtgttggccaggatggtcttgatctcttgaccttgtgatccacctgcctcatcatcccaaagtgctgggattacaggcgtgagccactgcgcccagcatgttagacaatttttaattcatcctctctgtgctgttgttttctcagctgtgaaaggaatattctggtggggacaaggttacagagttgctgagagggtctcatgacatgaaggtactggccttggcacagtgcctgggggggcggggactccgcacatgcctgtgatgtcacagttactgtcagttcacagcgaaccttccctccttttcctgttgactttcccacactcctgtaaccgtccctccctcccttcttcctctctctctcactcacgcacacgcacacacacacacacacactccattcactgtctccatgactctggagtaaactaacgtctcgagttgccattggaagccccattgtcctcattttgttttgttttgtttgtttgagacggggtctcgcaccactgcaccccagcctgggcaataagagtgaaactccatctcaaaaaaaaaaaaaaaaaggtacatgaaacatatgaagcaaaaagtgaaagtccccattcttttcctttttccagaggtgatttttgtggccaatctggtttcattccctcccagacacttttctaggcatctatgtgcctctattcacatataaacaaaataggagttttcctgtgcttcccttaaatggcatatgtatctttcactcttttttttcacctagtggatctttaataccttaaaagctcaacctgggcttggtgcggggctcatacgtgtagtcccaggcctttgggaggccaaggtgggaggatcacttgagctcaggagttccagaccattcttccaaagcaaaaacaaaaggattttgagatcagtgtggacaacttagcaaaacaccatct

SEQ ID NO: 802 - DNA, 1325 bp, Homo sapiens
  misc_feature: Incyte ID No: 020434.21
  unsure 1270: a, t, c, g, or other
cagcaggtggcctttcagccctccatacttactgagcctcccactgaggatcatcttctgcagaatactttgtggcctgaagttcaaaactatatgggcacggttatgaaatattttgtgttacttgtaacagttcaaagactctgcttgcctcagcttgtaaggcagctaagaaagagcatgcagctatcattctttggaacactacatcttggaaacaggtgcagaatttagttttccacagtttgacagtcacgcagatggccttctcacctaatgagaagttcttactagctgtttccagagatcgaacctggtcattgtggaaaaagcaggatacaatctcacctgagttcggtaaaacagcttctgattgggaaagttattagtgaaacagttatgttcattttatctacattaagcagctttagttaagagaaagataacagagtgaagggtagagcctcatgtctttgaagcctttcaaagttcttggataactgaggaagacttgaccttccttgtaagatttaaatggagatgatctttatttgggttgacctacttgtgattatgtagtcaagatggcatgcattcagatatctcagttcaagaaacataaacatctgtatgtaggaagttaggttttgcaaatggtgatagaatgctaccacaaaacctaatggataacttatcctaagctaggattttatgggacaggaataatgaagatacaactaagaaaactcatggttgagtggtttcttctctctgaactattttattaatatagtactattttaaattatgaaatgtagaggaaaccattatccttagctttttcctaccctctccagtcacctccttcattgagaagggcatattaggcatccatctggataaatgacccctgagcaaggtgttagcccacctacccacattctactctgaacctggcataaactggaaaaaaaaaaaaaggaggactaaaaaccttggtgtagtggggtcaggggcctattcgtgttcccccaagattctttgggggggataagttctaagagagtgtttaaagtatattggcatggttaaatccggttttaaattttcccatgggataagactcgcatacaggtggggtttggggatattccggggtctcttgggtgcctgggggtttaaggagaacacccaggggactggtaaaggtatactccagcaatatggttttcagacacagacgtggtttcctttgggcatcactaaatcnttttcctaaacatggcagcatttacgtggtttaacaaagctaaaagtccacctcg

SEQ ID NO: 803 - DNA, 2603 bp, Homo sapiens
  misc_feature: Incyte ID No: 233594.3
ggaggcggaggcccgggagttgggccgggacgggatccgggaggcttctgagccggagcaggcagcgcctggaggccagaggccgttcgcccgcctcaggccggtccggccgccgctcccctcccctgcgccctgttcccggcagggccagagaggccgccgcctccgcccggtggttctcgggcgaagggaagccgcgaagcaggtcctggggaagagctcgcctgctcctgagggaagcagcgataagatggcgctttgaaggggagccgaggccgagtcactctgttcgtcgggacgccgcctttctaacgccgccgtcggctcgcaccactctgggcctgctgcccacactgactgcgggggtccgggagagcgggatgctggccggccgcgcctggcttcttggaaagagcaggaaggagcgcgagaatgcagttccgcggcaggtgctcatcccagcagcttcgggctctcggttgtggtttttacacctatgacaaatgacatggccaaacacaccataatgtctgaaggtacaggtagccctaagcgcctgctcgtcacggaagagactgtcttgagagcacagaggagcaggatgcaaccgacaggctgtggccggacagctgctgcccagcacatggagcctgcacgcgcacggtttggccaaagaagcccccatactcccggtgaaaaagatttccagaagctgttctgtcaataacaaagtctcaaagaaaaccacaaaaccaccaacactaagatcattcttgagtccaatttgaaaaactagggtcaagttctgcagaggcattgaaaggacaagaaaccaccctgatacccatcgtgtgagggaaaatgctctattcaccattcctcagcttctgcttctggtttcagagttctctctatattggagggtgttttaaagctagagtggtctttatccacttttattaacacatctgaatgtgaaggtcaagagaggaaagtgatatgtcctaagtcagagtagagtcaacaagaaaataagacaaacagcgactgagcccctggtgtatactgggcattggccagctactggggatatggagatgaagaaaacataacccttcttcaaggagcccaacctaccaaggtagacagacatatagacaaatagatacttgcatagaaaaaaagaggaaaaggggatcagtgtgacctgtgtaactaagtaccctataaaccctcctgcaacagatcatattgccctttatagtggggatggtaatcccatctgaattccacaggtactttgcagtcataccacacccatgtgtctgtcggtcctgactgtaccatttataaacagcttcactttcagcagttctcagccctcttaagctagggtcattgtcagtagggatactgcttcataagcaccagcagaacaccaaaggagaccatatgggtgaaagcaaccagcactgccctggcgcttcataggttcttagagtttttatcttttactttcagtctaacacagcactgcctgctttttgtttttgttgcttggtttgtttttttcttaccgtgttcaccaaacttgtgtccaaatagctttgggctgatgcaaaaatatctatgtggaagagaagagttgttctcatggagggccttcagatgagtgctatagactctctaggcaactccaagaggcttctcaagcagggtgggcagtgagagctgctatggaatcaatggacaaactgacagggactgctttgaaagacagtactcagttgagtatatatattctctcttaagggctaaaagtttataatcatcccttaaacactctgtgatgggatcttcaggatcatcttttgaagtaaactatattttacaatgtgatataaatcaagtgagttttttttttaattaggaattcccgtaagtataaagccattttaagatgtacattttagagactagctattgttaagtggtctgttacatttgtgtaaaccataaagatctttccagaggaagcaagtctctcataccagaatatgaaaacactagccccaggcttgagtaacctagatcacatgaagctgacttcctctgaggagtctaggacctcagatataggtgggagcacacaatcacccttctggaaacagctaagacttgtggctcaggcgtttgaccttgctgacaaaggaagaggtcagggttgacgagagctccaggaagaatgaaagtgcctctggaaggcaggaagaaagttactgtaatactttatccttagggtggaacaagagtctgggaaagctctgccctataaagtccccttccccattcctcccaggtcccaggtgtggtggtataaggagagttggcccaatctgggagctgagggatctgagacatccatctactgcatcagtgcactcagaagtgaggattttggcacagttattcatgagacatcagcccatcatataaaacatgcctccagtttggttaaactaggaagcactatataatattttaaaatcagttacatgtcactgataaaagacttagtattaccatgatgttatttttcttga

SEQ ID NO: 804 - DNA, 691 bp, Homo sapiens
  misc_feature: Incyte ID No: 977449.1
cgagaccacaggcttcattgttaaaacacgcaggggcaggttgacatcagagtgcattacatcatctgctgaactgcttagactggcgggagcagcacctggcagcactgatggcgcagaccttcccactgtccaaatttcgctccttctcagtgttcctggggccctggacagagccctgggtgactaggtgtcagtatgtttctgaacaagccagacatttgtaattgtcaggtcccttcattggaaagggaattggctgtctcacagtttctttggtcagccagaggctgacccagaagcttcacagagaggccttgcttctcggcccagactgcttcccagtcgacagctatccaattgacattggtgggagcttggtcacagtggggctgagtgcctttggtggcaatatttgtttatggaggcaagtatgtcacagcatggccaccgtaagccagaccagagcctgagcagatcctgcagcagccaacagcctcagattccctacaggggctggaagatcaagttgaatgtatccatccatgcccatctgcaggcagcagaagcaggcagggtgtccttgcaccctctcctcctgctttcccagagtccagcatctgtgccagtgccacctatagacctggtaacttttttttcccggttctagtgttgtgtttgtccccacccc

SEQ ID NO: 805 - DNA, 582 bp, Homo sapiens
  misc_feature: Incyte ID No: 197828.11
ggaaagagccggtgaaggggcagaacaggcaggtgagagtctaagagggctcagtaatctgaagcttggtgggaagaagggattctgggctagaaagggtgcagaagcctgaagtagaaagagacgggattttggtccggggtggagagcgaatgcattgaaaagggccaaggcccaggataaggtagacatttaaaggggtacggatgcccaaggtagagcagacacttgaggagaccagctcagcaaacggaagacacttaaagtggtaggttctcaagagagaagaagtttttaagactagagctaagcaagacatttaaaaggacatgggttgggatttgggaacacgtttattccagaggcaggaacaaaggagtcgcttgtcaaggatctggttagagaagactagggtcttcctcgaaggaagcacgcgcacgcctgctctcccccattgtcttttctggcttctccaggttccctcgacccaggacccccctgttcccaggctatggcccccagtgccctgtagacctggcaggccccccgtgcttgcgacccctatttgggggtctgggtggc

SEQ ID NO: 806 - DNA, 336 bp, Homo sapiens
  misc_feature: Incyte ID No: 193797.1
gatagaaagaagtaaaccagtaactatgcatatgagatgaatactggataatgataagagctttacagaaaattaaaattgggtcatttaaaaatattgatgcctgattttatgttactctatatcaggcgcagttttaagtgctcatttaatcttttgaactgctacatgtactatattaaggcaatctcccatttacagatgaggaagtaggggcacagagaaggatgccacctttctaaaatcacatagctattaagtagaaaaggcagaattcaatctcaagcaattttcttccaaggccaatgtttattattaaagtaacataggcttttc

SEQ ID NO: 807 - DNA, 1834 bp, Homo sapiens
  misc_feature: Incyte ID No: 032735.1
  unsure 1070-1096: a, t, c, g, or other
gagaaggctcacacagccctggaaaccatgccactggccattccccatctgactcaggttacagatcccctcccttttcccactgaccactcactctcctctggccagatttgtttctgtttctctgaaagaggcagttcccacaactgcatgaggcttttgatattggccggtgggtgaagagtacagagggatgttactatacttaatttgattcttcctctccccagcagccacatctgtccttggcttccattgagctttataattcagttgaaacttcgtgtgtcttctgactttgaacttcttgttttgacagatctttctcaattgctggcaaatatggcacatgcattttgcatatggcattacacatacacacacatacgtgaagagcgttgtttctatccatgttacatctccttggaaattttagctaaatatttcccgattgcgtgtgcactttgatttacctataaatctgatgaatttacccataagccaggtcagttataaaaatgtttagcagtgtttccaaagacaagggtaagacctatttttttaaaataagaaaaacattgtgctatataagttgcaattatatacattctatatgtaaaccgcgttggtaaaactcttttaaaatagtgtttaaaattttcatttgttgaaatgtgggccatactattcacctttggaaacatgttgatgctgtcttgtttttcatgatccacagagagttaagtggtgattggatttggtctctacttaaacctcctcaaaaaataagtgtatcatagccaaacatgatctagttaccctctttattctaattgttccctcaaatcttatatgggctgtgtgactgctggctccttacatctaatctaaataaagaacaagaagggcattgcaacattgtggaaaaccctgtaacatgttttctcagctttcaggtatactagttccctgtccaacagtattaacattctgaaatccaatattgcttttgtccttttcttatttgcttttccattattttaagatgcctttatattgtgcatgtgtannnnnnnnnnnnnnnnnnnnnnnnnnntcattttcttcctctttgtaaatataatgcacctcatttggcagaagtttatttggggaagggaatatgcaggaatggagggtgttaggatgagggatcaggaagcctatcactaaagggaacctgtattttggtcttgattttgatattaaattgcagtgcgaccttgggcaagtcacttaacctctacacatctcagatatttgtcctctgataaaagaacctcacctctgggtttttcagcagtgctatttttatactgtatgaataggatgagaaatagtattggagagatgaaataatatatttttatagctcaattatattatcttctttttacaggtgagtaaactggaggaatcagatagggttaactttctcccagaacacattgggtaggttaggtgggcaaaggaccagtgggtaactttggaggcgggggtctcatgactcaaggacttagttgcacaaatgacaggatttctgctgttcagggcttccttcacagttgtgtgtgtatatgtacacgtgtgtgtatgtatgcatgcatttatcacgatatgcaccaaagagcctttacaaaacattttctaaattgatttacttcttttactcatattaacttatttttataagggatgactagtctatatagaagaaaaacttgtattgttttccataaacagaattatgtaaataatggcaaatacaatgaaaataaaataatgcattaacttc

SEQ ID NO: 808 - DNA, 407 bp, Homo sapiens
  misc_feature: Incyte ID No: 984490.1
cctatttaaagcattcagagaagtacagagatggtgataaggaacattggataccaccagccagctttgcccaaatcctttacattcctatatcccatattttatacttgcttgaaatttttatttgaagaaatcataggtacagtccaagcaccctgtgaacctccccccacccagagcactcttcctcctgcctttccttgagctactaataatcctggtgactatgtccccaaaatgcatatctttatattttaccacagatataattacatatggacgatatataatcttgttttgcatgttttaaaactatgtaagtggatcttgctgtatgtatccctttgttacttccaaaaccttaaaaaacctaaataacgattagagatttatagaaaaaaaaaaaa

SEQ ID NO: 809 - DNA, 418 bp, Homo sapiens
  misc_feature: Incyte ID No: 984490.2
ttccaggtgatttatatcctcattaatcatagaagggttttttctgtctttttattttagctatttccggtgggtgtgtagtagtatctcattttggttttaatttatatatttccctgatgattaaaaggggatgtcctgtaaatgttttcttttgtgaaataccatagcacacatttaagggataaagaaggcccgtcccagaggcaatgttgcatacagttcctgtcccactgggccctgctgactaggatggggagtccaggggtaacagctacccgataccacggcttcgaggagttaaggatttatgggcagattgatacctgcctgggtcggcatggatgcaatgagtatttttagacgagggaattatttcaagggccatgatagggaggccttgagcttaaggtatccg

SEQ ID NO: 810 - DNA, 283 bp, Homo sapiens
  misc_feature: Incyte ID No: 028791.1
taactacacatcttccatctcacctttttctctgcagatgaagccccagcttgttcaggcagcagatggtcataccttggcctgagggtgggtgttctagcccagccatgataataatctcatactggtccaaggattgtcagagacaagtttttaaccattgggatatgagaggatatctactaaagatactttaccttcatgaataacaaataaagcttcttggggaaatagccttttcctccttttctgtcttcttgctgtcctgagcatagatgtgatg

SEQ ID NO: 811 - DNA, 2561 bp, Homo sapiens
  misc_feature: Incyte ID No: 018109.1
tggaagtcaacaaaaacaggtacaagaaatttcagtgaagaaaaaaggaattttaaataaattaacaaaagaaaactaatagaatatatgctgtaaagtgttacacagtcattaaaatgcagctatatactggctttgaatatattggcagccaataaagataaattaaccagttgagattcatacagtccaagtttaccagatgcttaggagacgcaaagctttgcctagcattctgtcaagaaaggttttgctgtctgtgtgactaatcttacatgaatgattttcccagaattgagttttccaaagaaatatgggaacaaggggctggagttgtgggtattctgttttgtcattcaaaggcagatctttctacattacaaatcaaagtacaactgacaacctctcgaaattgaagaacctaagcactagcccacaacctcacatctgcctagaggaacaactgggtagaaaagaccaaccaaccaatcttttgcccttcagtcagcccttctgcctattttgggcttaaatttctataaacacttagttctgccctttcaaattgaagggttattctctttgggtgaaaaaattaggagtggggttgttacgacatgaaatacagagggcccttcccttttttgttttgaaacttagccattattattgtgtgacttacaatatgtattttaaaatttatattattttacagatctcacaaatctatgaggttgagagggcagatatactctatggatgagaaaacttaggctctactcgttcagggtcacactggtgacagctaagtcttttcagttacagcctgtgcccttttgacatgttgcttttttcctctccccttattgtacatgccctagttccaggcctttgccattctggtgtttgaccatggctcacaaatctcttgctaatatctatccactccaggtaaaaagtctgcctgtcctatatttttatacatgtcattttaaagaaagagttgattagagctccttatgcatgcacattcatttcttggatgtctttccttttttaaaactgaaatcatgttttagttttctctctttttagaatttaattcttgggaatctttcaagtctaacacacatgataaataatgcatatatatgtaactatatgcaacattcccttcattataaatcttgactgttttaaaaaatggtttgaatacagaatatttgcatcagttttttcctttaatttgaaatactagagtagctgttcttattgcttcctttaaaaactacgattgaagtacacaaacagtatcaaatgttctactttgggcaaaactagactttactgtatcacacccggcctgcactgtcttaactttgagaaacttgtctatttcaggtaagtgatactgtccactgcccaaaaaggaaaaatactaatctatataatctgtaaattatttctgaattgtaggacattaattcacttgaatcccgtggttactttgcctcacattagaaatagctgggaagcttttcataagcctgtgtcttagctcctactccataccaattaagtcagtgtttgggaaagggagccaggcatctttatttttaaaatatctctaggtgatttcattgtgcagcaacattttagaaccactgccttatagttacaataaagaaagcgttaacatttagggttctgtgttccaacccaagtgttccaaaaatggaaaaaggtagtttgagatatagtattacaaatagcttttttaaaacctacatactgtgtattttatcgattctaaagcctttttcttatatttaacatgtctttaattaggatgactttgtaagagtcttatgaaacagtacaccaagttaatgtgccttgtctcttcaaagaaattactctggaaagctatatgctaattctaataatgttaccattcaaaatacttttaaatggctttttagaggagaatctaaattttacagtatatttaacagaggacaaatgttcctgttgaagattttagttttaaaaagagctgtgtcatttgaagttaatgtgatgtgaatcaagctaggtaatgtcgtacttggttcaaatggagatgtggctatgagattgacacaagttttcttaagagcttcatcaaacatatggaagcagttccaaaaagtttcccaaatatttttgggcagtggcagcagtaactcagagttttaaaattcaaatcagaattttaagaaaccttagagattattcctttattacaaatgaagaacctaaggttcaggaaaacttttgacgcatcagttggttcagatagtcagtggcagaactgcgcaagaactcgccctctgactccccgttgagttttagcctgaacccccattcactcccatcccaaagaccagtgggggtgggggttcagggagggaaacaagtgtcccaccaactgaattttaaaatattgcagaattttgctgggtgttctctgcaggtttacccagtctgtggaaaccagaatcagatgtcagacaaacatg

SEQ ID NO: 812 - DNA, 643 bp, Homo sapiens
  misc_feature: Incyte ID No: 231452.1
gctcgagggatttctctatttgtttatgcgaaatcgtctactggcattaccatctctcaaaacattttcctggacttttaactaaagattttttccattgtaatgggcacaagtgcaatttccctttcattttaagagactgtgagaagtaacaaatcaggtaagtaaaattattaaagaaggaactagcacttaaaaaatataatttataaaaccaagttgcctaagagaagcgtcagcttacaagactttgttacttcatggcattaatagtttcaggaacattataatacatagtttaattttctttggtgtttgtcatgtttggggggtggaggtacttttttcttatagattttatgataataacttggttttaatagcacttttgaatttgctagacactaaaacaaagaccgttttataaattgaaaattcacttgtgtgaacactaaatgctgggatttgatttctttgtttctatagaaacaaaagaaagttgagattaaaataagctaaaatggaattacattttatgaaacagtaaagaagcttattttacttgtttccattgtagtgtggtgaaataaaatttttatttaaaacccaagctgtctgtgggcccttctgccttctgagaaaa

SEQ ID NO: 813 - DNA, 2844 bp, Homo sapiens
  misc_feature: Incyte ID No: 334501.2
  unsure 1090: a, t, c, g, or other
ttctattttgttaaagcgcccaaggggaccgggaaccttggagagaagagtggggaggaaagaggaagggtgggtggggggcagagggcgagtcggcggcggcgagggcaagctcttcttgcggcacgatgccgtctctgctggtgctcactttctccccgtgcgtactactcggctgggcgttgctggccggcggcaccggtggcggtggcgttggcggcggcggcggtggcgcgggcataggcggcggacgccaggagagagaggcgctgccgccacagaagatcgaggtgctggtgttactgccccaggatgactcgtacttgttttcactcacccgggtgcggccggccatcgagtatgctctgcgcagcgtggagggcaacgggactgggaggcggcttctgccgccgggcactcgcttccaggtggcttacgaggattcagactgtgggaaccgtgcgctcttcagcttggtggaccgcgtggcggcggcgcggggcgccaagccagaccttatcctggggccagtgtgcgagtatgcagcagcgccagtggcccggcttgcatcgcactgggacctgcccatgctgtcggctggggcgctggccgctggcttccagcacaaggactctgagtactcgcacctcacgcgcgtggcgcccgcctacgccaagatgggcgagatgatgctcgccctgttccgccaccaccactggagccgcgctgcactggtctacagcgacgacaagctggagcggaactgctacttcaccctcgagggggtccacgaggtcttccaggaggagggtttgcacacgtccatctacagtttcgacgagaccaaagacttgggtcctggcaagacatcgtgcgcaatatccaggccagtgagagagtggtgatcatgtgtgcgagcagtgacaccatccggagcatcatgctggtggcgcacaggcatggcatgaccagtggagactacgccttcttcaacattgagctcttcaacagctcttcctatggagatggctcatggaagagaggagacaaacacgactttgaagctaagcaagcatactcgtccctccantgacagtcactctactggaggacagtgaaaccctggagtttgacgaagttttccatggcaggtgacaagttcagttgagaaacaagggctcaatatggaggattacgttaacatgtttgttgaaggattccacgatgccatcctcctctacgtcttggctctacatgaagtactcagagctggttacagcaaaaaggatggagggaaaattatacagcagacttggaacagaacatttgaaggtatcgccgggcaggtgtccatagatgccaacggagaccgatatggggatttctctgtgattgccatgactgatgtggaggcgggcacccaggaggttattggtgattattttggaaaagaaggtcgttttgaaatgcggccgaatgtcaaatatccttggggccctttaaaactgagaatagatgaaaacccgaattgtagagcatacaaacagctctccctgcaaatcatccaggtggcctagaagaatcggccagttgacaaggaattgtcgtgggggctttactaggagctggcttgctaatggccttctactttttcaggaagaaatacagaataaccattgaagaggcgaacccaggcaagaagaaagtgaccttggaaaacatcgggaattacgggaagattccatcagatcccatttttcagtagcttaaaggaagccccccactttttttttttctgcctgagattctttaaggagatagacgggttgaaagacatcaatgaaaccagaaggggcgttcttgaagaattcataattttaagcagttagtaatttcattttaaaatttctgtagaagctcaggaattatgattaatcaccatctgcctccaggcctttcatctcatgacaaacaaatataataatgatatcgtgtcactctgttaaatgttcatactgtttcaagcccatatgattagatttatgtttttaaaatctgttgtctccatatcttgatggcttttgggagcatttcacaccaaggatataaaatgcggttttcttaaatgaaatgttttgtagctagaataaaatcatttttacaagtacagcattcttggaaagaatttaacacccaaaaaggggaaaatgtaatgaaaaatctcaaggttggaaatacagccttactctctctagagctggaggacaggtttgtggttgaggacttctctgtccgatgtctacattcaggttctgacttcatatcttgaaaaaggatttcctccctgtctttttcagtgtctcataaacgctacttctggattgttgtaaatattagtgagatgggaggatttccagaagtaaagcccagtccaaaatatgttccctttttgaatgtaaaaaaaaaaagccctatttcgcactaacattttattttacaagtattttaatcttatattttggtattagaaaaatttgtctattttttcattttgaagattaaatgttgcttacattttaaaagcatgggtgaagtgtacaacaaaccaataatgataaaaaatacttctctttttctccctgtttccctttgttcccttggccacagccaaatgctaattgctgctttaattacagagatgtgtaaatgtattcagattacaaactctacaggaatacatcaacattttaactcttttgcgtttttactgtttaactgttttaaatgcaagttattttagggtgacactccttccagttctggccagatcatgagtttcaagat

SEQ ID NO: 814 - DNA, 8674 bp, Homo sapiens
  misc_feature: Incyte ID No: 474770.10
  unsure 2512-2737, 2949, 3618-3637, 5343, 5897, 6014-6343, 8014: a, t, c, g, or other
gaattcatgccccttttgaaatagacttatgtcattgtcagaaaacataagcatttatggtatatcattaatgagtcacgattttagtggttgccttgtgagtaggtcaaatttactaagcttagatttgttttctcacatattctttcggagcttgtgtagtttccacattaatttaccagaaacaagatacacactctctttgaggagtgccctaacttcccatcattttgtccaattaaatgaattgaagaaatttaatgtttctaaactagaccaacaaagaataatagttgtatgacaagtaaataagctttgctgggaagatgttgcttaaatgataaaatggttcagccaacaagtgaaccaaaaattaaatattaactaaggaaaggtaaccatttctgaagtcattcctagcagaggactcagatatatataggattgaagatctctcagttaagtctacatgaaaaggatggtttcttggagcttccacaaacttaaaaccatgaaacatctattattgctactattgtgtgtttttctagttaagtcccaaggtgtcaacgacaatgaggaggtgaattttttaaagcattattatattattagtagtattattaatataagatgtaacataatcatattatgtgcttattttaatgaaattagcattgcttatagttatgaaatggaattgttaacctctgacttattgtatttaaagaatgtttcatagtatttcttatataaaaacaaagtaatttcttgttttctagtttatcacctttgttttcttaagatgaggatggcttagctaatgtaagatgtgtttttctcacttgctattctgagtactgtgattttcatttacttctagcaatacaggattacaattaagaggacaagatctgaaaatctcacaaactataaaataataaaagagcagaattttaagataaaagaaactggtggtaggtagattgttctttggtgaaggaaggtaatatatattgttactgagattactatttataaaaattataactaagcctaaaagcaaaatacatcaagtgtaatgatagaaaatgaaatattgcttttttcagatgaaaagttcaaattagagttagtgtgtattgttattattaatagttatgaaacacggttcagtctaatttatttatttgtagaacagtttgtcctcaactattatttttgctgacttattgctgttaatttgcagttactaaaaatacagaaatgcatttaggacaatggatatttaagaaatttaaattttatcatcaaacgtatcatggccaaatttcttacatatagcatagtatcattaaactagaaataagaatacacaataatatttaaatgaagtgattcatttcggatcattattgagtttcaagggaacttgagtgttgtacttatcagactctacatgtaagaacatatagttaatctggttgtgtgtgtaaaaacatatggttaatctggttaagtctggttaatcatattaggtaagaaaaatgtaaagaatgtgtaagacgaaatttttgtaaagtactctgcaaagcactttcacatttctgcttatcaactaaacctcacagagatagtttaatagtttaggctttaaaatggattttgattattcaacaagtggccttcataatttctttaagtgtttttctttaagtatatactttctttaaatattttttaaaatttccttttctctagtaaagccagaccatccatgctacctctctagtggcactctgaaataaaaagaaaatagttttctctgttataattgtatttgtaataagcagatgaatcacatttcttaaaatttgttttagagagggtaagctctgactaggaccatgacttcaatgtgaaatatgtatatatcctccgaatctttacatattaagaatgtatatagtcaactggttaaacaggaaaatctggaacagcctggctgggttttaatcttagcaccatcctactaaatgttaaataatattataatctaatgaataaatgacaatgcaattccaaatagagttcatctgatgacttctagactcacaaaattgcaagagagctcagttgttgctcagttgttccaaatcatgtcgtttgttaatttgtaattaagctccaaaggatgtatagctactgacaaaaaaaaaaatgagaatgtagttaatccaaatcaaaactttcctattgcaatgcgtattttctgcttcattatcctttaatataatattttaagttagcaagtaattttaattacaatgcacaagccttgagaattattttaaatataagaaaatcataatgtttgataaagaaatcatgtaagaaatttcaagataatggtttaacaaataattttgttgatagaagataagactaaaagtgaaattcgaagtggagaggacacttaaactgtagtacttgttatgtgtgattccagtannnnnnnnnnnnnnnnnnnnnnnnnnnnnnnnnnnnnnnnnnnnnnnnnnnnnnnnnnnnnnnnnnnnnnnnnnnnnnnnnnnnnnnnnnnnnnnnnnnnnnnnnnnnnnnnnnnnnnnnnnnnnnnnnnnnnnnnnnnnnnnnnnnnnnnnnnnnnnnnnnnnnnnnnnnnnnnnnnnnnnnnnnnnnnnnnnnnnnnnnnnnnnnnnnnnnnnnnnnnnnnnnntatgagggtcaaagattgtcttattacaaataaattccaagtagaatcaacctttaataagtctttaatgtctcttaaatatgtttatataggagtctaatcaccaattcacaaaaatgaaagtagggaaatgattaacaataatcataggaatctaacaatccaagtggcttgagaatattcattcttcttgacagtatagattctttacnatttcgtaagtgccaatgtatgttttaggaatatgaggtcattactattcataatctgatacagctttatcctaaggcctctctttaaaaactacactgcatcatagcttttttgtgcagttggtctttctactgttactgaacagtaagcaacctacagattcactatcaccaaccagccagttgatggatcttaagcaaattatcaagcttgtgataacctaaattataaaatgagggtgttggaatagttacattccaaatcttctataacactctgtattatatttctgcctcattccttgtagggtttcttcagtgcccgtggtcatcgaccccttgacaagaagagagaagaggctcccagcctgaggcctgccccaccgcccatcagtggaggtggctatcgggctcgtccagccaaagcagctgccactcaaaagaaagtagaaagaaaagcccctgatgctggaggctgtcttcacgctgacccagacctggtgggtgcactgatgtttcttgcagtggtggctctctcatgcagagaaagcctgtagtcatggcagtctgctaatgtttcactgacccacattaccatcactgttattttgtttgtttattttggaaataaaattcaaaacataaacatattgggcctttggtttaggnnnnnnnnnnnnnnnnnnnnggtctgggcccaaaatttcaaattaggatatgtgggtgccacctttccatttgtattttgccactgcctttgtttagttggtaaaattttcatagcccaattatattttttctggggtaagtaatattttaaatctctatgagagtatgatgatgactttcgaatttctggtcttacagaaaaccaaataataaatttttatgttggctaatcgtatcgctgaattttcctatgtgctattttaacaaatgtccatgacccaaatccttcatctaatgcctgctattttctttgtttttagggggtgttgtgtcctacaggatgtcagttgcaagaggctttgctacaacaggaaaggccaatcagaaatagtgttgatgagttaaataacaatgtggaagctgtttcccagacctcctcttcttcctttcagtacatgtatttgctgaaagacctgtggcaaaagaggcagaagcaagtaaaaggtagatatccttgtgctttccattcgattttcagctataaaattggaaccgttagactgccacgagaatgcatggttgtgagaagattaacatttctgggttagtgaatagcattcatacgcttttgggcaccttcccctgcaacttgccagataagcactattcagctcttattcccagtctgacatcagcaagtgtgattttctatgaaaaattctactatgactccttattttaagtatacaagaaacttgtgactcagaagataatatttacagagtggaaaaaaacccctagcatttatagttttaacatttgaggttttgaatgagagagttatccataatatattcaattgtgttgtggataatgacacctaacctgtgaatcttgaggtcagaatgttgagtgctgttgacttggtggtcaggaaacagctagtgcgtgagcctggcacaggcatctcagtgagtagcatacccacagttggaaatttttcaaagaaatcaaaggaatcatgacatcttataaatttcaaggttctgctatacttatgtgaaatggataaataaatcaagcatatccactctgtaagattgaacttctcagatggaagaccccaatactgctttctcctcttttccctcaccaaagaaataaacaacctatttcatttattactggacacaatctttagcgtatacctatggtaaattactagtatggtggttaggatttatgttaatttgtatatgtcatgcgccaaatcatttccactaaatatgactatatatcataactgcttggtgatagctcagtgtttaatagtttattctcagaaaatcaaaatggtatagttaaatacatcagttttatgaggcaaaaatgctaactatttctacataatttcatttttccagataatgaaaatgtagtcaagtgagtactcctcagaactggaaaagcaccaattatatatagatgagactgtgaatagcaatatcccaactaaccttcgtgtgcttcgttcaatcctggaaaacctgagaagcaaaatacaaaagttagaatctgatgtctcagctcaaatggaatattgtcgcacccatgcactgtcagttgcaatattcctgtggtgtctggcaaaggtaactgattcataaacatatttttagagagttccagaagaactcacacaccaaaaataagagaacaacaacnacaacaaaaatgctaagtggattttcccaacagatcatagtgacattacagtacatcataaaaatatccttagccagttgtgttttggactggcctggtgcatttgctggttttgatgagcaggatggggcacaggtagtcccaggggtggctgatgtgtgcatctgcgtactggcttgaacagatggcagaaccacagatagatgtagaagtttctccattttgtgtgttctgggagctcatggatattccaggacacaaaaggtggagaagagctttgttcatcctcttagcagataaacgtcctcaaaactgggttggacttactaaagtaaaatgaaaatctaatatttgttatattattttcaaaggtctataataacacactccttagtaacttatgtaatgttattttaaagaattggtgactaaatacaaagtaattatgtcataaacccctgaacataatgttgtcttacatttgcagaatgtgaggaaattatcaggaaaggaggtgaaacatctgaaatgtatctcattcaacctgacagttntgtcaaaccgtatagagtatactgtgacatgaatacagaaaatggaggtaagctttcgacagttgttgacctgttgatctgtaattatttggataccgtaaaatgccaggaaacaannnnnnnnnnnnnnnnnnnnnnnnnnnnnnnnnnnnnnnnnnnnnnnnnnnnnnnnnnnnnnnnnnnnnnnnnnnnnnnnnnnnnnnnnnnnnnnnnnnnnnnnnnnnnnnnnnnnnnnnnnnnnnnnnnnnnnnnnnnnnnnnnnnnnnnnnnnnnnnnnnnnnnnnnnnnnnnnnnnnnnnnnnnnnnnnnnnnnnnnnnnnnnnnnnnnnnnnnnnnnnnnnnnnnnnnnnnnnnnnnnnnnnnnnnnnnnnnnnnnnnnnnnnnnnnnnnnnnnnnnnnnnnnnnnnnnnnnnnnnnnnnnnnnnnnnnnnnnnnnnnnnnnnnnncttagctctaacatctaacatagctgacaaagagtaatttgatgtggaattcaacctgatatttaaaaagttataaaatatctataattcacaatttggggtaagataaagcacttgcagtttccaaagattttacaagtttacctctcatatttatttccttattgtgtctattttagagcaccaaatatatactaaatggaatggacaggggattcagatattattttcaaagtgacattatttgctgttggttaatatatgctctttttgtttctgtcaaccaaaggatggacagtgattcagaaccgtcaagacggtagtgttgactttggcaggaaatgggatccatataaacagggatttggaaatgttgcaaccaacacagatgggaagaattactgtggcctaccaggtaacgaacaggcatgcaaaataaaatcattctatttgaaatgggattttttttaattaaaaaacattcattgttggaagcctgttttaggcagttaagaggagtttcctgacaaaaatgtggaagctaaagataagggaagaaaggcagtttttagtttcccaaaattttatttttggtgagagattttattttgtttttcttttaggtgaatattggcttggaaatgataaaattagccagcttaccaggatgggacccacagaacttttgatagaaatggaggactggaaaggagacaaagtaaaggctcactatggaggattcactgtacagaatgaagccaacaaataccagatctcagtgaacaaatacagaggaacagccggtaatgccctcatggatggagcatctcagctgatgggagaaaacaggaccatgaccattcacaacggcatgttcttcagcacgtatgacagagacaatgacggctggtatgtgtggcactctttgctcctgctttaaaaatcacactaatatcattactcagaatcattaacaatatttttaatagctaccacttcctgggcacttactgtcagccactgtcctaagctctttatgcatcactcgaaagcatttcaactataaggtagacattcttattctcattttacagatgagatttagagagattacgtgatttgtccaatgtcacacaactacccagagataaaactagaatttgagcacagttactttctgaataatgagcatttagataaatacctatatctctatattctaaagtgtgtgtgaaaactttcattttcatttccagggttctctgatactaagggttgtaaaagctattattccagtataaagtaacaaacacagtccctagatggattggccacaaaggcccagttatctctctttcttgctatagggcacaggaggtctttggtgtattagtgtgactctatgtatagcacccaaaggaaagactactgtgcacacgagtgtagcagtcttttatgggtaatctgcaaaacgtaacttgaccaccgtagttctgtttctaataacgccaaacacattttctttcaggttaacatcagatcccagaaaacagtgttctaaagaagacggtggtggatggtggtataatagatgtcatgcagccaatccaaacggcagatactactggggtggacagtacacctgggacatggcaaagcatggcacagatnatggtgtagtatggatgaattggaaggggtcatggtactcaatgaggaagatgagtatgaagatcaggcccttcttcccacagcaatagtccccaatacgtagatttttgctcttctgtatgtgacaacatttttgtacattatgttattggaattttctttcatacattatattcctctaaaactctcaagcagacgtgagtgtgactttttgaaaaaagtataggataaattacattaaaatagcacatgattttcttttgttttcttcatttctcttgctcaccaagaagtaacaaaagtatagttttgacagagttggtgttcataatttcagttctagttgattgcgagaattttcaaataaggaagaggggtcttttatccttgtcgtaggaaaaccatgacggaaaggaaaaactgatgtttaaaagtccacttttaaaactatatttatttatgtaggatctgtcaaagaaaacttccaaaaagatttattaattaaaccagactctgttgcaataagttaatgttttcttgttttgtaatccacacattcaatgagttaggctttgcacttgtaaggaaggagaagcgttcacaacctcaaatagctaataaaccggtcttgaatatttgaagatttaaaatctgactcta

SEQ ID NO: 815 - DNA, 1708 bp, Homo sapiens
  misc_feature: Incyte ID No: 1973832CB1
cgcagctctgtgtgaaggtgcagttttgccaaggagtgctaaagaacttagatgtcagtgcataaagacatactccaaactttcagagacagcagagcacacaagcttctaggacaagagccaggaagaaaccaccggaaggaaccatctcactgtgtgtaaacatgacttccaagctggccgtggctctcttggcagccttcctgatttctgcagctctgtgtgaaggtgcagttttgccaaggagtgctaaagaacttagatgtcagtgcataaagacatactccaaacctttccaccccaaatttatcaaagaactgagagtgattgagagtggaccacactgcgccaacacagaaattattgtaaagctttctgatggaagagagctctgtctggaccccaaggaaaactgggtgcagagggttgtggagaagtttttgaagagggctgagaattcataaaaaaattcattctctgtggtatccaagaatcagtgaagatgccagtgaaacttcaagcaaatctacttcaacacttcatgtattgtgtgggtctgttgtagggttgccagatgcaatacaagattcctggttaaatttgaatttcagtaaacaatgaatagtttttcatggtaccatgaaatatccagaacatacttatatgtaaagtattatttatttgaatctacaaaaaacaacaaataatttttaaatataaggattttcctagatattgcacgggagaatatacaaatagcaaaattgaggccaagggccaagagaatatccgaactttaatttcaggaattgaatgggtttgctagaatgtgatatttgaagcatcacataaaaatgatgggacaataaattttgccataaagtcaaatttagctggaaatcctggatttttttctgttaaatctggcaaccctagtctgctagccaggatccacaagtccttgttccactgtgccttggtttctcctttatttctaagtggaaaaagtattagccaccatcttacctcacagtgatgttgtgaggacatgtggaagcactttaagttttttcatcataacataaattattttcaagtgtaacttattaacctatttattatttatgtatttatttaagcatcaaatatttgtgcaagaatttggaaaaatagaagatgaatcattgattgaatagttataaagatgttatagtaaatttattttattttagatattaaatgatgttttattagataaatttcaatcagggtttttagattaaacaaacaaacaattgggtacccagttaaattttcatttcagatatacaacaaataattttttagtataagtacattattgtttatctgaaattttaattgaactaacaatcctagtttgatactcccagtcttgtcattgccagctgtgttggtagtgctgtgttgaattacggaataatgagttagaactattaaaacagccaaaactccacagtcaatattagtaatttcttgctggttgaaacttgtttattatgtacaaatagattcttataatattatttaaatgactgcatttttaaatacaaggctttatatttttaactttaagatgtttttatgtgctctccaaattttttttactgtttctgattgtatggaaatataaaagtaaatatgaaacatttaaaatataatttgttgt

SEQ ID NO: 816 - DNA, 2380 bp, Homo sapiens
  misc_feature: Incyte ID No: 2512889CB1
cagctgtcggtggcttctgctgagatggccagaggactccaggttcccctgccgcggctggccacaggactgctgctcctcctcagtgtccagccctgggctgagagtggaaaggtgttggtggtgcccactgatggcagcccctggctcagcatgcgggaggccttgcgggagctccatgccagaggccaccaggcggtggtcctcaccccagaggtgaatatgcacatcaaagaagagaaatttttcaccctgacagcctatgctgttccatggacccagaaggaatttgatcgcgttacgctgggctacactcaagggttctttgaaacagaacatcttctgaagagatattctagaagtatggcaattatgaacaatgtatctttggcccttcataggtgttgtgtggagctactgcataatgaggccctgatcaggcacctgaatgctacttcctttgatgtggttttaacagaccccgttaacctctgcggggcggtgctggctaagtacctgtcgattcctgctgtgtttttttggaggtacattccatgtgacttagactttaagggcacacagtgtccaaatccttcctcctatattcctaagttactaacgaccaattcagaccacatgacattcctgcaaagggtcaagaacatgctctaccctctggccctgtcctacatttgccatactttttctgccccttatgcaagtcttgcctctgagctttttcagagagaggtgtcagtggtggatcttgtcagctatgcatccgtgtggctgttccgaggggactttgtgatggactaccccaggccgatcatgcccaacatggtcttcattgggggcatcaactgtgccaacgggaagccactatctcaggaatttgaagcctacattaatgcttctggagaacatggaattgtggttttctctttgggatcaatggtctcagaaattccagagaagaaagctatggcaattgctgatgctttgggcaaaatccctcagacagtcctgtggcggtacactggaacccgaccatcgaatcttgcgaacaacacgatacttgttaagtggctaccccaaaacgatctgcttggtcacccgatgacccgtgcctttatcacccatgctggttcccatggtgtttatgaaagcatatgcaatggcgttcccatggtgatgatgcccttgtttggtgatcagatggacaatgcaaagcgcatggagactaagggagctggagtgaccctgaatgttctggaaatgacttctgaagatttagaaaatgctctaaaagcagtcatcaatgacaaaagttacaaggagaacatcatgcgcctctccagccttcacaaggaccgcccggtggagccgctggacctggccgtgttctgggtggagtttgtgatgaggcacaagggcgcgccacacctgcgccccgcagcccacgacctcacctggtaccagtaccattccttggacgtgattggtttcctcttggccgtcgtgctgacagtggccttcatcacctttaaatgttgtgcttatggctaccggaaatgcttggggaaaaaagggcgagttaagaaagcccacaaatccaagacccattgagaagtgggtgggaaataaggtaaaattttgaaccattccctagtcatttccaaacttgaaaacagaatcagtgttaaattcattttattcttattaaggaaatactttgcataaattaatcagccccagagtgctttaaaaaattctcttaaataaaaataatagactcgctagtcagtaaagatatttgaatatgtatcgtgccccctccggtgtctttgatcaggatgacatgtgccatttttcagaggacgtgcagacaggctggcattctagattacttttcttactctgaaacatggcctgtttgggagtgcgggattcaaaggtggtcccaccgctgcccctactgcaaatggcagttttaatcttatcttttggcttctgcagatggttgcaattgatccttaaccaataatggtcagtcctcatctctgtcctgcttcataggtgccaccttgtgtgtttaaagaagggaagctttgtacctttagagtgtaggtgaaatgaatgaatggcttggagtgcactgagaacagcatatgatttcttgctttggggaaaaagaatgatgctatgaaattggtgggtggtgtatttgagaagataatcattgcttatgtcaaatggagctgaatttgataaaaacccaaaatacagctatgaagtgctgggcaagtttactttttttctgatgtttcctacaactaaaaataaattaataaatttatataaattctaaaaaaaaaaa

SEQ ID NO: 817 - DNA, 2336 bp, Homo sapiens
  misc_feature: Incyte ID No: 337199.1
  unsure 605, 741, 756, 1259, 1842: a, t, c, g, or other
atgagacacctagtacaggagagcaaaattgcaccagagattcttaaccaaccagccttaccaaacaacacaacaggggaaccccaatctgccttacccaaggccccactggcagctttccacagaatttgcatttagaggagcagaatgacatcactgtcctttgggagtaggtcctctgaaaaggcagcaggttccagcaggtagctgagctgagaggacatatggcccacggggacctacagacagcctttgacatttgtatttcttacaatggagggccaaggagggcaaggggctgtggagtttggtgtctactagtgtgtatgaatttgagctagagtccttctgtggcatgcactttgaccactcctggcagtcacatggcagatttccaagtgcaaatccttaatccaaacaaggatcatctaatgacaccaccaggccaatccctgctctcctccccgaaaagtcagggtcccttcattggaatcctccacccacccaagcagaatttagcagagatttgccttcaaaccctaacggcccccttgttctctggtccttctcaaacccacctttgtaggccacccagcattgcaggncagcgtgtggggcagctggacctgtgcttcctgcctgggagtctcccttggaattcatcctgactccttctaataaaaatggatgggaaagcaaaacactttgccttctaaaggccgtataccaagtatgcttagntaaataagccacttntctattacttaagtaagaaggaagtagtaattgatactatttattgtttgtgtgtggtagcttgaagcacaccactgtccatttatttgtaagtgtaaaatatgtgtgtttgtttcagcagcacttaaaaaagccagtgtctggttacacatttcaattttaattaattgacataaaaatgctaccgccagtgccagctgcatcctatttaattaaaaaggtactatatttgtacattattttttaatgttaaaagggcttttttaagtttacagtacacataccgagtgactttagggatgcttttgtgttgaaatgttactatagtggctgcaggcagcaacccagaaacactttagaagctttttttccttgggaaaaattcaagcacttcttccctccaccctcactccaaccaccccaatgggggtaattcacatttcttagaacaaattctgcccttttttggtctagggattaaaattttgtttttccttctttcntttttttttttttcactgaacccttaatttgcactgggtcatgtgtttgatttgtgatttcaagaccaaagcaaagtcttactactactgtggaaccatgtactagttcctgggaattaaaatagcgtggttctctttgtagcacaaacattgctggaatttgcagtcttttcaatgcagccacatttttatccatttcagttgtctcacaaattttaacccatatcagagttccagaacaggtaccacagctttggttttagattagtggaataacattcagcccagaactgagaaactcaacagattaactatcgtttgctctttagacggtctcactgcctctcacttgccagagccctttcaaaatgagcagagaagtccacaccattagggaccatctgtgataaattcagaagggaggagatgtgtgtacagctttaaggattccctcaattccgaggaaagggactggcccagaatccaggttaatacatggaaacacgaagcattagcaaaagtaataattatacctatggtatttgaaagaaccataataaaagacacttcttccaaaccttgnaatttgttgtttttagaaaacgaatgcatttaaaaatattttctatgtgagaattttttagatgtgtgtttacttcatgtttacaaataactgtttgctttttaatgcagtactttgaaatatatcagccaaaaccataacttacaataatttcttaggtattctgaataaaattccatttcttttggatatgctttaccattcttaggtttctgtggaacaaaaatatttgtagcattttgtgtaaatacaagctttcatttttattttttccaattgctattgcccaagaattgctttccatgcacatattgtaaaaattccgctttgtgccacaggtcatgattgtggatgagtttactcttaacttcaaagggactatttgtattgtatgttgcaactgtaaattgaattatttggcatttttctcatgattgtaatattaatttgaagtttgaatttaattttcaataaaatggcttttttggttttgt

SEQ ID NO: 818 - DNA, 739 bp, Homo sapiens
  misc_feature: Incyte ID No: 212155.1
cgccttgcgagctcagagtgtgcccgctgcgccgccgctgtccgtacctgccgccgccgccaccgccaccatgcccaacttcgccggcacctggaagatgcgcagcagcgagaatttcgacgagctgctcaaggcactgggtgtgaacgccatgctgaggaaagtggccgtagcggctgcgtccaagccgcacgtggagatccgccaggacggggatcagttctacatcaagacatccaccacggtgcgcaccactgagatcaacttcaaggtcggagaaggctttgaggaggagaccgtggacggacgcaagtgcaggagtttagccacttgggagaatgagaacaagatccactgcacgcaaactcttcttgaaggggacggccccaaaacctactggacccgtgagctggccaacgatgaacttatcctgacgtttggcgccgatgacgtggtctgcaccagaatttatgtccgagagtgaaggcagctggcttgctcctactttcaggaagggatgcaggctcccctgaggaatatgtcatagttctgagctgccagtggaccgcccttttcccctaccaatattaggtgatcccgttttccccatgacaatgttgtagtgtcccccacccccaccccccaggccttggtgcctcttgtatccctagtgctccatagtttggcatttgcacggtttccgaagtcattaaactggttagaacgtgtctgcaaaaaa

SEQ ID NO: 819 - DNA, 1588 bp, Homo sapiens
  misc_feature: Incyte ID No: 244262.1
ggagggatgaatgcagataaagggagtgcagaaggcacgaggaaaccaaagtgctctgtatcctccagtctccgcgcctccacccagctcaggaacccgcgaaccctctcttgaccactatgagcctcccgtccagccgcgcggcccgtgtcccgggtccttcgggctccttgtgcgcgctgctcgcgctggctgctcctgctgacgccgccggggcccctcgccagcgctggtcctgtctctgctgtgctgacagagctgcgttgcacttgtttacgcgttacgctgagagtaaaccccaaaacgattggtaaactgcaggtgttccccgcaggcccgcagtgctccaaggtggaagtggtagcctccctgaagaacgggaagcaagtttgtctggacccggaagccccttttctaaagaaagtcatccagaaaattttggacagtggaaacaagaaaaactgagtaacaaaaaagaccatgcatcataaaattgcccagtcttcagcggagcagttttctggagatccctggacccagtaagaataagaaggaagggttggtttttttccattttctacatggattccctactttgaagagtgtgggggaaagcctacgcttctccctgaagtttacagctcagctaatgaagtactaatatagtatttccactatttactgttattttacctgataagttattgaaccctttggcaattgaccatattgtgagcaaagaatcactggttattagtctttcaatgaatattgaattgaagataactattgtatttctatcatacattccttaaagtcttaccgaaaaggctgtggatttcgtatggaaataatgttttattagtgtgctgttgagggaggtatcctgttgttcttactcactcttctcataaaataggaaatattttagttctgtttcttggggaatatgttactctttaccctaggatgctatttaagttgtactgtattagaacactgggtgtgtcataccgttatctgtgcagaatatatttccttattcagaatttctaaaaatttaagttctgtaagggctaatatattctcttcctatggttttagacgtttgatgtcttcttagtatggcataatgtcatgatttactcattaaactttgattttgtatgctattttttcactataggatgactataattctggtcactaaatatacactttagatagatgaagaagcccaaaaacagataaattcctgattgctaatttacatagaaatgtattctcttggttttttaaataaaagcaaaattaacaatgatctgtgctctgaaagttttgaaaatatatttgaacaatttgaatataaattcatcatttagtcctcaaaatatatacagcattgctaagattttcagatatctattgtggatcttttaaaggttttgaccattttgttatgaggaattatacatgtatcacattcactatattaaaattgcacttttattttttcctgtgtgtcatgttggtttttggtacttgtattgtcatttggagaaacaataaaagatttctaaaccaaaaa

SEQ ID NO: 820 - DNA, 1440 bp, Homo sapiens
  misc_feature: Incyte ID No: 2796468CB1
gacgtaggtcagactggaaccatggagctcagcgtcctcctcttccttgcactcctcacaggcctcttgctactcctggttcagcgtcaccctaactcccatggcaccctcccaccagggccccgccctctgccccttttggggaaccttctgcagatggacagaagaggcctactcaaatcctttctgaggttccgagagaaatatggggacgtcttcacggtacacctgggaccgaggcccgtggtcatgctgtgtggagtagaggccatacgggaggccctggtggacaacgctgaggccttctctggccggggaaaaatcgtcatcatggacccagtctaccagggatatggcatgctctttgccaatggaaaccgctggaaggtgcttcggcgattctctgtgaccaccatgagggacttcgggatgggaaagcggagtgtggaggagcggattcaggacgaggctcagtgtctgatagaggaacttcggaaatccaagggagccctcgtggaccccaccttcctcttccattccattaccgccaacatcatctgctccatcatctttggaaaacgcttccactaccaagatcaagagttcctgaagacgctgaacttgttctgccagagtttcttactcatcagctctatatccagccagctgtttgagctcttctctggcttcttgaaatactttcctggggcacacaggcaagtttacaaaaacctacaggaaatcaatgcttacattggccacagtgtggagaagcaccgtgaaaccctggaccccagcgcccccagggacctcatcgacacctacctgctccacatggaaaaagagaaatccaacccacacagtgaattcagccaccagaacctcatcatcaacacgctctcgctcttctttgctggcactgagaccaccagcaccactctccgctacggcttcctgctcatgctcaaataccctcatgtcgcagagagagtctacaaggagattgaacaggtggttggcccacatcgccctccagcgcttgatgaccgagccaaaatgccatacacagaggcagtcatccgtgagattcagagatttgctgaccttctccccatgggtgtgccccacattgtcacccaacacaccagcttctgagggtacaccatccccaaggacacggaagtatttctcatcctgagcactgctctccgtgacccacactactttgaaaaaccagacgccttcaatcctgaccactttctggatgccaatggggcactgaaaaagaatgaagcttttatccccttctccttagggaagcggatttgtcttggtgaaggcattgcccgtgcggaattgttcctcttcttcaccaccatcctccagaacttctccgtggccagccccgtggctcctgaagacatcgatctgacaccccag

SEQ ID NO: 821 - DNA, 1220 bp, Homo sapiens
  misc_feature: Incyte ID No: 480668.20
tcgggatcgatctggagctccgggaatttccctggcccgggactccgggctttccagccccaaccatgcataaaaggggttcgccgttctcggagagccacagagcccgggccacaggcagctccttgccagctctcctcctcgcacagccgctgcgaaccgcctgctgagcccccatggcccgcgccacgctctccgccgcccccagcaatccccggctcctgcgggtggcgctgctgctcctgctcctggtggccgccagccggcgcgcagcagggagcgcccctggccactgcaactgcgctgccagtgcttgcagaccctgccagggaattcacctcaagaacatccaaagtgtgaaggtgaagtcccccggaccccactgcgcccaaaccgaagtcatagccacactcaagaatgggcagaaagcttgtctcaaccccgcatcgcccatggttaagaaaatcatcgaaaagatgctgaaaaatggcaaatccaactgaccagaaggaaggaggaagcttattggtggctgttcctgaaggaggccctgcccttacaggaacagaagaggaaagagagacacagctgcagaggccacctggattgcgcctaatgtgtttgagcatcacttaggagaagtcttctatttatttattaatttatttatttgtttgttttagaagattctatgttaatattttatgtgtaaaataaggttatgattgaatctacttgcacactctcccattatatttattgtttattttaggtcaaacccaagttagttcaatcctgattcatatttaatttgaagatagaaggtttgcagatattctctagtcatttgttaatatttcttcgtgatgacatatcacatgtcagccactgtgatagaggctgaggaatccaagaaaatggccagtaagatcaatgtgacggcagggaaatgtatgtgtgtctattttgtaactgtaaagatgaatgtcagttgttatttattgaaatgatttcacagtgtgtggtcaacatttctcatgttgaagctttaagaactaaaatgttctaaatatcccttggacattttatgtctttcttgtaaggcatactgccttgtttaatgttaattatgcagtgtttccctctgtgttagagcagagaggtttcgatatttattgatgttttcacaaagaacaggaaaataaaatatttaaaaatat

SEQ ID NO: 822 - DNA, 600 bp, Homo sapiens
  misc_feature: Incyte ID No: 223187CB1
atctggtcagcaatcaggaatcccttcatcgtgacccccgcatgggcaaaggcttccctggaatctcccacactgtctgctccctataaaaggcaggcagatgggccagaggagcagagaggctgagaccaacccagaaaccaccacctctcacgccaaagctcacaccttcagcctccaacatgaaggtctccgcagcacttctgtggctgctgctcatagcagctgccttcagcccccaggggctcgctgggccagcttctgtcccaaccacctgctgctttaacctggccaataggaagataccccttcagcgactagagagctacaggagaatcaccagtggcaaatgtccccagaaagctgtgatcttcaagaccaaactggccaaggatatctgtgccgaccccaagaagaagtgggtgcaggattccatgaagtatctggaccaaaaatctccaactccaaagccataaataatcaccatttttgaaaccaaaccagagcctgagtgttgcctaatttgttttcccttcttacaatgcattctgaggtaacctcattatcagtccaaagggcatgggttttattatatatata

SEQ ID NO: 823 - DNA, 5981 bp, Homo sapiens
  misc_feature: Incyte ID No: 228001.3
gtcccaggcaagatagggtcccagaatcttacagcccagaggccacctgttgcaacttcttttttacagatggagtcatcagaacccactgtgaggaagtgacttctccttgaggtcacccagacactccaaacagagcagagcaaaagcgcctagaacttgaaattttggacctgtctccaacaccctggggatttccaccaggaaggtgagcacccccactgagaattccaggctgctcagaggtgccagggaacacagaccagggaccagctgtggccccctcctccgatgtgcccagggaagtgggggaagccagcggcagcctgcgattctcaaccaggggaactctcactgtgctttctgagagtctgtgacacgggtcattttctctgacttgctctcttgctttttctcactctaaaaaaaaaaaaaaaatgatggggaccactcctaaagccattcagttcaccattccaggggattttgatatcgccacaaagggtaattccttgcgtccatcccagtgcgtgtgactcagcttgtgacgtttgaaccacacaagccagagagaagaagataaagtcatcagagctcctactcaccagagagtgaggcccaggccaggactccacaaggctggtcccctgccctggagcaacttaaacaggccctctggccagcctggaaccctgagatggcctccagctcaggcagcagtcctcgcccggcccctgatgagaatgagtttccctttgggtgccctcccaccgtctgccaggacccaaaggagcccagggctctctgctgtgcaggctgtctctctgagaacccgaggaatggcgaggatcagatctgccccaaatgcagaggggaagacctccagtctataagcccaggaagccgtcttcgaactcaggagaaggctcaccccgaggtggctgaggctggaattgggtgcccctttgcaggtgtcggctgctccttcaagggaagcccacagtctgtgcaagagcatgaggtcacctcccagacctcccacctaaacctgctgttggggttcatgaaacagtggaaggcccggctgggctgtggcctggagtctgggcccatggccctggagcagaacctgtcagacctgcagctgcaggcagccgtggaagtggcgggggacctggaggtcgattgctaccgggcaccctgctccgagagccaggaggagctggccctgcagcacttcatgaaggagaagcttctggctgagctggaggggaagctgcgtgtgtttgagaacattgttgctgtcctcaacaaggaggtggaggcctcccacctggccctggccacctctatccaccagagccagctggaccgtgagcgcatcctgagcttggagcagagggtggtggagcttcagcagaccctggcccagaaagaccaggccctgggcaagctggagcagagcttgcgcctcatggaggaggcctccttcgatggcactttcctgtggaagatcaccaatgtcaccaggcggtgccatgagtcggcctgtggcaggaccgtcagcctcttctccccagccttctacactgccaagtatggctacaagttgtgcctgcggctgtacctgaatggagatggcactggaaagagaacccatctgtcgctcttcatcgtgatcatgagaggggagtatgatgcgctgctgccgtggcccttccggaacaaggtcaccttcatgctgctggaccagaacaaccgtgagcacgccattgacgccttccggcctgacctaagctcagcgtccttccagaggccccagagtgaaaccaacgtggccagtggatgcccactcttcttccccctcagcaaactgcagtcacccaagcacgcctacgtgaaggacgacacaatgttcctcaagtgcattgtggagaccagcacttagggtgggcggggctcctgagggagctccaactcagaagggagctagccagaggactgtgatgccctgcccttggcacccaagacctcagggcacaaagatgggtgaaggctggcatgatccaagcaagactgaggggtcgacttcgggctggccatctggttaggatggcaggacgtgggctgggcccacaaaggcaaagggtccagaaggagacaggcagagctgctcccctctgcacggaccatgcgacactgggaggccagtgagccactccggccccgaatgttgaggtggactctcaccaaatgagaagaaaatggaaccaggcttggaaccgtaggacccaagcagagaagctctcgggctaggaagatctctgcagggccgccagggagacctggacacaggcctgctctctttttctccagggtcagaaacaggaccgggtggaagggatggggtgccagtttgaatgcagtctgtccaggctcgtcattggaggtgaacaagcaaacccagagggctccactaggacttcaaattgggggttggatttgaagacttttaagtttccttccagcccagaaagtctctcattctaggcctcctggcccaggtgagtcctagagctacaggggttctggaaacattcaggagcttcctgtcctcccagctcctcactcaccttcagtaacccccactggactgacctggtccacagggcacctgccaccctgggcctggcagctcagcttccccaacacgcaggagcacacccagcccccacatcctgtgcctccatcagctaaacaccacgtcacttcatgcaggtgaaacccagtcactgtgagctcccaggtgcagccagaggcacctcaagaagaagaggggcataaactttcctcttcctgcctagaggccccacctttggtgctttccagaatcccgtaacacctgattaactgaggcatccacttctttcagcagactgatcaggacctccaagccactgagcaatgtataaccccaaagaaataatttttagaatctctttcgaagttttcctaaagtgtatggttgggagttgtttgtactgagccaggtttgaaaaggccattgctgagtttgaggtggtgccaccagttttgcaggtggcatcagaggctggcatgctggcaggaacatcccctcttagccccagtcttctcttttctataatgagacccaccccagcttgcctccctccctggcttctctgaccctcaaaggagatgccacgcaggacagactggagagagaagcctgggcaatactgcccgcctgtcatggcctggtggtggcccacacctatcttctcaccttggaggccacacccaactttccaaagaccctgagtcaagtcaggaccctactactctcccctgctgctttcctgacagcttactcttcctccacctgctgagcctgtgccagactccattgctcaaatcgttagggttgcttctataaaaatgggtcagtagcccttcctgttctctccagcccagcatacaggaggatcaaaggaggtgacggagcatcgtggcacggcagtctcaatgggtcagaaacccaggccagctgggctctaagcctggcatcctgtcatgcttagtccttcagctgaagatcagaggaagcctctcccttgccctctccagctctaggggttttcaggaggcccaactgcaataatggagcactagtgcttttatgtgcaatggtgtcgtccatgcacgacagcagcaaacattctggggctgctttttattgttcccacggctgacagcgtggcagcggagactgtggaggcagtggagactgacttcttcctgctgacagctggatgtcacacatgaaggtctggcctagcgagtgatgggtctaggccctgaaactgatgtcctagcaataacctcttgatccctactcaccgagtgttgagcccaaggggggatttgtagaacaagcccccatgagaaacagctgttactctacacttttgattgcctatttctgatggcaagagatacatactctcttcaaagagcatgagatgcagccattctttcagcaaagcttcattgacacctgcacctgttaactgtgttcgacattgaagggagaaaggcaagatgtgcactctggactcaagaaactcttagttcagtggaggaaatgagcagataagtagatcattatgattgagagtaggagaagcttagagaaagcacagaaccccagatccagctggtgaaggagggaaggcttcaggcctttaagctcagcctgagaatattgtgaaatgcagaggatggggaaaagggaagagtaccgacttgaaaacggagagctgtcttggctgagggcagggtctgtgtggcaggatgggggagggagtcagaagggtcagatgaactggagtgtagacagcatcagatgcagcagtgcccaccgccccccccccaaccccccgccctgcccacagagcacctgctggtaaccctgggcctattgaaagcaggatgagatgataatttaagacactgaatgatttcttttccaacaaagctctatgttaagtgcatcaaagatgtgacattgcatcttttacaggtgattcaagggtgggggaggcaagatgcaggcaaagccaccgtttcactgggtggattcagtaggtcccccacccccagcagttcccgaaggtgctggggagatttttaaaacaccagtgacagaatctcacccccgtaagtgataaagcctgagcatcaggatgaagtctcctgcaggggaaggttctgatgccccagtcaagtctgactggccgttgggggcgaaaggtgtgactgaagcactgacaaggtgggtggaggcactaacctgtaacacctcctctggcttggaaagttttgcttcatcaactacagctggaacctccgggggcaaggcagaagggccagaacagggaggtcttctactgaggggctgtcatcgatgtcctgagacatttgtggagcttctggtatacacagtgcagacagtttcccctgagaagctgattgtctaaaagtgacacaaaccctcttcctgccacgtgcccccgaaaagcccatcagaaacctgaatggcttcccgttgccaactgaagcatcctcaccctgtacattagaaccccctgcggagacttcatcctgatgctcaggctttatcacttaacagcccctgaagtgcacttagaataccaggtgctgccggctcctgggtctggccataaggtgcgctccttacttggtttctctgactcctaatccaaatgagccaagggtctgaggggctgcacaggcagtaggtgtggagcacagctctgagcccaagcctgggcctccaagctgcgctgctgctgtagggcctgatctcccacctatcccttccctgcaggtcaccttcatgctgctggaccagaacaaccgtgagcacgccattgacgccttccggcctgacctaagctcagcgtccttccagaggccccagagtgaaaccaacgtggccagtggatgcccactcttcttccccctcagcaaactgcagtcacccaagcacgcctacgtgaaggacgacacaatgttcctcaagtgcattgtggagaccagcacttagggtgggcggggctcctgagggagctccaactcagaagggagctagccagaggactgtgatgccctgcccttggcacccaagacctcagggcacaaagatgggtgaaggctggcatgatccaagcaagactgaggggtcgacttcgggctggaccatctggttaggatggcaggacgtgggctgggcccacaaaggcaaagggtccagaaggagacaggcagagctgctcccctctgcacggaccatgcgacactgggaggccagtgagccactccggccccgaatgttgaggtggactctcaccaaatgagaagacaatggaaccaggctt

SEQ ID NO: 824 - DNA, 2007 bp, Homo sapiens
  misc_feature: Incyte ID No: 242716.1
ggggatccctgcttggctcacttcctgagctggtgactgccagggttcccacctcgccaaggctagagggctccgggtgtgtgtgcaggtgtcgggggagtgacctccactcctcaacctcgggcagctcccacaggccacagccgggctccccacccccggcacccagctctctacggcaggtccgggagggctggggcttcggggagccctacccgccaaacctgctgttggcccgggagagccccagaggctcccggagactgcagcctcctgtggttgggctgggagccggcagggtttggggtgtgggcgtccccaccacgcatagcaggaatggcaggaagggacaaaagcctgttccagagaccctgggaggaccccaggcagggagagcccgcctgcctccaccctttccaacgagccatcttggtaactgggaacaaacacaccccaccccgtttttccttaaaagaggccttaatccccgagcccccgctgccagggcagagggaggagggggcacagctgtgccaagcccggccccactggtgtgtcctcacaatgtgaccccagaaatgccagcagggaacggaggctgctgcagagacgcagccccaggcagccggggctcctaggctggtgcagatggtggggttaaacgggctgagcgttccaggtaaactgaggctcggggaggggaaggacaggctggcctctccttcactgtccacagggccttgggttccctgagctgtccagaccccaccatctcccggaccccagggaggtggccattgccagaagcctgtgggtttctttctagcttgggggattaaaaaaaaaattctccacttttttttttcttgagtagacttcagtgaccacactgtggaaaatacctttgcagacgtggcacccgagtgcacacaccgaccgccacatgtgcttttctgccgggaatccctggggtgaacgcatgttttatgggcgtttccaggagcgcgcgtgcacctccagacggggagctggcgggcgggggtggcagcagcagctctagccttggggggacaagcctctctcagctacgccaggggaaaagagagttaaggacactcacccccacccacgcacacacacaaggcagcgtcgggtgggagagagaaggccgtttctccttctgtagcctgggtctcccacgggccttccccgctgctgagcgagacaccagtagccaggtgaagggccacagcgggccaggccccgaccctgttgtgacccacctgggcaccttcccggaccagctccgcctcccctgccctcctctctccaggaaggagccagaaccctcacccctctcccaccctccccaggggtaaccccaggccaagcacagatagctcagctgcgacctctggcctctggggacataaacggggcggctgggccagggcggaaggtgctcctgtttccctccttctgcgtggtccctttgacgggccggccaccgtgtccgaggcgcaacgctaggcctccaggccacgcatccatctccaagttaacagcccgtcctgcccaagttctggggcaggtaggagagggccgtcacacacctgtccgcccgtgagtgacccgggggggcttccgggtggaggtggagccaccacgcccttcctcaaggggtcacttattaaaaagtccacggcctgaggccaggccctctgcacagaagccatatgccggccagccgcgcctcctcctctgtccacggaaccgctgcccatctaaccttcgtaaagacctgtctcctgtttccagccgccgcctgtggttctagcaggttctatgccatctgcattgggatgtctggttgtttttatttctgacttttttaaaattccaggtgtgccgcacccactttctcgcagtgttttaatattgtgtggagttgtcgataccacgtgaattcatacacaataaaaagcctcactctcccttttaaaaaaa

SEQ ID NO: 825 - DNA, 1508 bp, Homo sapiens
  misc_feature: Incyte ID No: 1360301CB1
gcagcccagccccacccagacccatggctggacctgccacccagagccccatgaagctgatggccctgcagctgctgctgtggcacagtgcactctggacagtgcaggaagccacccccctgggccctgccagctccctgccccagagcttcctgctcaagtgcttagagcaagtgaggaagatccagggcgatggcgcagcgctccaggagaagctgtgtgccacctacaagctgtgccaccccgaggagctggtgctgctcggacactctctgggcatcccctgggctcccctgagcagctgccccagccaggccctgcagctggcaggctgcttgagccaactccatagcggccttttcctctaccaggggctcctgcaggccctggaagggatctcccccgagttgggtcccaccttggacacactgcagctggacgtcgccgactttgccaccaccatctggcagcagatggaagaactgggaatggcccctgccctgcagcccacccagggtgccatgccggccttcgcctctgctttccagcgccgggcaggaggggtcctggttgcctcccatctgcagagcttcctggaggtgtcgtaccgcgttctacgccaccttgcccagccctgagccaagccctccccatcccatgtatttatctctatttaatatttatgtctatttaagcctcatatttaaagacagggaagagcagaacggagccccaggcctctgtgtccttccctgcatttctgagtttcattctcctgcctgtagcagtgagaaaaagctcctgtcctcccatcccctggactgggaggtagataggtaaataccaagtatttattactatgactgctccccagccctggctctgcaatgggcactgggatgagccgctgtgagcccctggtcctgagggtccccacctgggacccttgagagtatcaggtctcccacgtgggagacaagaaatccctgtttaatatttaaacagcagtgttccccatctgggtccttgcacccctcactctggcctcagccgactgcacagcggcccctgcatccccttggctgtgaggcccctggacaagcagaggtggccagagctgggaggcatggccctggggtcccacgaatttgctggggaatctcgtttttcttcttaagacttttgggacatggtttgactcccgaacatcaccgacgtgtctcctgtttttctgggtggcctcgggacacctgccctgcccccacgagggtcaggactgtgactctttttagggccaggcaggtgcctggacatttgccttgctggacggggactggggatgtgggagggagcagacaggaggaatcatgtcaggcctgtgtgtgaaaggaagctccactgtcaccctccacctcttcaccccccactcaccagtgtcccctccactgtcacattgtaactgaacttcaggataataaagtgtttgcctccaaaaaaaaaaaaaaagg

SEQ ID NO: 826 - DNA, 731 bp, Homo sapiens
  misc_feature: Incyte ID No: 370489.46
  unsure 222: a, t, c, g, or other
gaaaggctaaagttctctggaggatgtggctgcagagcctgctgctcttgggcactgtggcctgcagcatctctgcacccgcccgctcgcccagccccagcacgcagccctgggagcatgtgaatgccatccaggaggcccggcgtctcctgaacctgagtagagacactgctgctgagatggtaagtgagagaatgtgggcctgtgcctaggccacccagntggcccctgactggccacgcctgtcagcttgataacatgacattttccttttctacagaatgaaacagtagaagtcatctcagaaatgtttgacctccaggagccgacctgcctacagacccgcctggagctgtacaagcagggcctgcggggcagcctcaccaagctcaagggccccttgaccatgatggccagccactacaagcagcactgccctccaaccccggaaactttcctgtgcaacccagattatcacctttgaaagtttcaaagagaacctgaaggactttctgcttgtcatcccctttgactgctgggagccagtccaggagtgagaccggccagatgaggctggccaagccggggagctgctctctcatgaaacaagagctagaaactcaggatggtcatcttggagggaccaaggggtgggccacagccatggtgggagtggcctggacctgccctgggccacactgaccctgatacaggcatggcagaagaatggg

SEQ ID NO: 827 - DNA, 998 bp, Homo sapiens
  misc_feature: Incyte ID No: 782996CB1
gctgggtgcgagcgccctaccgctttcgctttcccttcgcggtgcccactccactccttgtgcggcgctaggcccccccgtcccggtcatggccatgctcagggtccagcccgaggcccaagccaaggtggatgtgtttcgtgaagacctctgtaccaagacagagaacctgctcgggagctatttccccaagaagatttctgagctggatgcatttttaaaggagccagctctcaatgaagccaacttgagcaatctgaaggccccattggacatcccagtgcctgatccagtcaaggagaaagagaaagaggagcggaagaaacagcaggagaaggaagacaaggatgaaaagaagaagggggaggatgaagacaaaggtcctccctgtggcccagtaaactgcaatgaaaagatcgtggtccttctgcagcgcttgaagcctgagatcaaggatgtcattgagcagctcaacctggtcaccacctggttgcagctgcagatacctcggattgaggatggtaacaattttggagtggctgtccaggagaaggtgtttgagctgatgaccagcctccacaccaagctagaaggcttccacactcaaatctctaagtatttctctgagcgtggtgatgcagtgactaaagcagccaagcagccccatgtgggtgattatcggcagctggtgcacgagctggatgaggcagagtaccgggacatccggctgatggtcatggagatccgcaatgcttatgctgtgttatatgacatcatcctgaagaacttcgagaagctcaagaagcccaggggagaaacaaagggaatgatctattgagagccctctctcccattctgtgatgagtacagcagagaccttcctgctttttactggggactccagattttccccaaacttgcttctgttgagatttttccctcaccttgcctctcaggcacaataaatatagttataccactgcccatcaaaaaaaaaa

SEQ ID NO: 828 - DNA, 588 bp, Homo sapiens
  misc_feature: Incyte ID No: 344291.2
  unsure 294, 310, 313, 324-325, 348, 364: a, t, c, g, or other
ctgagctgcaagagcccagctactcgccgaacccgggccgcctgcgttcaatctttgggatcatcagcatggaatcttcattatcccctctctcctgggcacctgcttcccgcgcacctggatgaggaccagaggaattcgcgaatttccgaatcaccgcaggaaaaaccagctggcctgaatcaaagcaattctgggtaaaagacttcccagatgatctctcaacgccttggcaacgcttggcgactgggagctagaaccatgagttgttaatgtgtgcacggaagccacaantgtgcaggacgcaagntgngttattggaannggacgacaccaaggaggcgttgncgcggatgtggtggangatgccaagtcgtcttttaaaaaaggaagtgaagaatgattaagagggtcacgccctctaccactccaacctctctaatcagtctctttctgctccgtctgctgtacatgcacctgctcaggtgagacctcaaggaaaaataatcctgtgggtccacctaatctggtaagtgttgtatttggaaaatcaaaccccaaattaaacgcaggacgtggaaactgaaa

SEQ ID NO: 829 - DNA, 1125 bp, Homo sapiens
  misc_feature: Incyte ID No: 1350572CB1
cccaccgggaacgaaagagaagctctatctcccctccaggagcccagctatgaactccttctccacaagcgccttcggtccagttgccttctccctggggctgctcctggtgttgcctgctgccttccctgccccagtacccccaggagaagattccaaagatgtagccgccccacacagacagccactcacctcttcagaacgaattgacaaacaaattcggtacatcctcgacggcatctcagccctgagaaaggagacatgtaacaagagtaacatgtgtgaaagcagcaaagaggcactggcagaaaacaacctgaaccttccaaagatggctgaaaaagatggatgcttccaatctggattcaatgaggagacttgcctggtgaaaatcatcactggtcttttggagtttgaggtatacctagagtacctccagaacagatttgagagtagtgaggaacaagccagagctgtgcagatgagtacaaaagtcctgatccagttcctgcagaaaaaggcaaagaatctagatgcaataaccacccctgacccaaccacaaatgccagcctgctgacgaagctgcaggcacagaaccagtggctgcaggacatgacaactcatctcattctgcgcagctttaaggagttcctgcagtccagcctgagggctcttcggcaaatgtagcatgggcacctcagattgttgttgttaatgggcattccttcttctggtcagaaacctgtccactgggcacagaacttatgttgttctctatggagaactaaaagtatgagcgttaggacactattttaattatttttaatttattaatatttaaatatgtgaagctgagttaatttatgtaagtcatatttatatttttaagaagtaccacttgaaacattttatgtattagttttgaaataataatggaaagtggctatgcagtttgaatatcctttgtttcagagccagatcatttcttggaaagtgtaggcttacctcaaataaatggctaacttatacatatttttaaagaaatatttatattgtatttatataatgtataaatggtttttataccaataaatggcattttaaaaaattcagcaaaaaaaaaa

SEQ ID NO: 830 - DNA, 2136 bp, Homo sapiens
  misc_feature: Incyte ID No: 2170967CB1
ggctcttttaaatgaccccaggcgtcgtgtattgaatcctagactcacgtccgtctcgccggcgcccgagccagtccgcgcgcaccgcgtctgcgtccccgaaagccccgcccgcaagggctgccctgcctacctggtctccgacgtgctcgtctggagggcggtgcgaggggccgagccgacaagatgttcttgctgcctcttccggctgcggggcgagtagtcgtccgacgtctggccgtgagacgtttcgggagccggagtctctccaccgcagacatgacgaagggccttgttttaggaatctattccaaagaaaaagaagatgatgtgccacagttcacaagtgcaggagagaattttgataaattgttagctggaaagctgagagagactttgaacatatctggaccacctctgaaggcagggaagactcgaaccttttatggtctgcatcaggacttccccagcgtggtgctagttggcctcggcaaaaaggcagctggaatcgacgaacaggaaaactggcatgaaggcaaagaaaacatcagagctgctgttgcagcggggtgcaggcagattcaagacctggagctctcgtctgtggaggtggatccctgtggagacgctcaggctgctgcggagggagcggtgcttggtctctatgaatacgatgacctaaagcaaaaaaagaagatggctgtgtcggcaaagctctatggaagtggggatcaggaggcctggcagaaaggagtcctgtttgcttctgggcagaacttggcacgccaattgatggagacgccagccaatgagatgacgccaaccagatttgctgaaattattgagaagaatctcaaaagtgctagtagtaaaaccgaggtccatatcagacccaagtcttggattgaggaacaggcaatgggatcattcctcagtgtggccaaaggatctgacgagcccccagtcttcttggaaattcactacaaaggcagccccaatgcaaacgaaccacccctggtgtttgttgggaaaggaattacctttgacagtggtggtatctccatcaaggcttctgcaaatatggacctcatgagggctgacatgggaggagctgcaactatatgctcagccatcgtgtctgctgcaaagcttaatttgcccattaatattataggtctggcccctctttgtgaaaatatgcccagcggcaaggccaacaagccgggggatgttgttagagccaaaaacgggaagaccatccaggttgataacactgatgctgaggggaggctcatactggctgatgcgctctgttacgcacacacgtttaacccgaaggtcatcctcaatgccgccaccttaacaggtgccatggatgtagctttgggatcaggtgccactggggtctttaccaattcatcctggctctggaacaaactcttcgaggccagcattgaaacaggggaccgtgtctggaggatgcctctcttcgaacattatacaagacaggttgtagattgccagcttgctgatgttaacaacattggaaaatacagatctgcaggagcatgtacagctgcagcattcctgaaagaattcgtaactcatcctaagtgggcacatttagacatagcaggcgtgatgaccaacaaagatgaagttccctatctacggaaaggcatgactgggaggcccacaaggactctcattgagttcttacttcgtttcagtcaagacaatgcttagttcagatactcaaaaatgtcttcactctgtcttaaattggacagttgaacttaaaaggtttttgaataaatggatgaaaatcttttaacggagacaaaggatggtatttaaaaatgtagaacacaatgaaatttgtatgccttgattttttttttcatttcacacaaagatttataaaggtaaagttaatatcttacttgataaggatttttaagatactctataaatgattaaaatttttagaacttcctaatcacttttcagagtatatgtttttcattgagaagcaaaattgtaactcagatttgtgatgctaggaacatgagcaaactgaaaattactatgcacttgtcagaaacaataaatgcaacttgttgtgaaaaaaaaaaa

SEQ ID NO: 831 - DNA, 824 bp, Homo sapiens
  misc_feature: Incyte ID No: 088564CB1
gcactcccaaagaactgggtactcaacactgagcagatctgttctttgagctaaaaaccatgtgctgtaccaagagtttgctcctggctgctttgatgtcagtgctgctactccacctctgcggcgaatcagaagcagcaagcaactttgactgctgtcttggatacacagaccgtattcttcatcctaaatttattgtgggcttcacacggcagctggccaatgaaggctgtgacatcaatgctatcatctttcacacaaagaaaaagttgtctgtgtgcgcaaatccaaaacagacttgggtgaaatatattgtgcgtctcctcagtaaaaaagtcaagaacatgtaaaaactgtggcttttctggaatggaattggacatagcccaagaacagaaagaaccttgctggggttggaggtttcacttgcacatcatggagggtttagtgcttatctaatttgtgcctcactggacttgtccaattaatgaagttgattcatattgcatcatagtttgctttgtttaagcatcacattaaagttaaactgtattttatgttatttatagctgtaggttttctgtgtttagctatttaatactaattttccataagctattttggtttagtgcaaagtataaaattatatttgggggggaataagattatatggactttcttgcaagcaacaagctattttttaaaaaaaaactatttaacattcttttgtttatattgttttgtctcctaaattgttgtaattgcattataaaataagaaaaatattaataagacaaatattgaaaataaagaaacaaaaagtt

SEQ ID NO: 832 - DNA, 2046 bp, Homo sapiens
  misc_feature: Incyte ID No: 480668.19
  unsure 59, 84, 86, 1487, 1495, 1503: a, t, c, g, or other
tagcaggcagctccttgccagctctcctcctcgcacagccgctcgaaccgcctgctganccccatggcccgcgccacgctctcngncgcccccagcaatccccggctcctgcgggtggcgctgctgctcctgctcctggtggccgccagccggcgcgcagagggagcgcccctggccactgaactgcgctgccagtgcttgcagaccctgcagggaattcacctcaagaacatccaaagtgtgaaggtgaagtcccccggaccccactgcgcccaaaccgaagtcatgtaagtctcgcccatcagctgccgctgccactgctggggtccccgactctcccgctgccccaaaccctgtcctcagcccgacctcctgtctcacgagattcccttctctctgcagagccacactcaagaatgggcagaaagcttgtctcaaccccgcatcgcccatggttaagaaaatcatcgaaaagatgctgaaaaagtaagttataatttccatgtacacaggcgactggagctgttggtcagaaatactggcgtctgccccctaaaaagtaaatcaggaaaacccagggttagctgcaggactgaaaaaattattattttcacaaagttgccattaaggttattaatctgttctggtgccagaggatattcccagtgcccagggtcaccacccaggttcttccctcctgccagtgaatgtaggtaaaactgctttcatgtaaggtctcattggagtttgccagttgtgctgaagtgttttccacctgttaaaaaacacaagcttcatttcccctagttcctactgactttcagacctgaaaagcagaccccctggttttttgtaaaagtttagggttgaagtgcagagatttcacaataatattgcactgggtatataactggttgccaccacctattagccatgtcactcagagacaatattatttagtttatctgagactcagcaaaacagggaaaataatggtagctacatcatgaggttgctttgaggctcaagtgaggcccagtatgacaaagagcaataggctctggctgttttagccagtaaaacagtgtagactgccactcctccaccccacgtcacccccattcctaaaagagcatcccaagcctagaggtccttgccacacagcacagctgtcacaggcagtacccacttgggtgccaggctggggaaactgcattcagaaaactctagagcctggggaaacaggacaggagaagactgttgtgcagtcagctttcctgagcacctactcagggcacccattttctcattacagtggcaaatccaactgaccagaaggaaggaggaagcttattggtggctgttcctgaaggaggccctgcccttacaggaacagaagaggaaagagagacacagctgcagaggccacctggattgcgcctaatgtgtttgagcatcacttaggagaagtcttctatttatttatntatttatntatttatntgtttgttttagaagattctatgttaatattttatgtgtaaaataaggttatgattgaatctacttgcacactctcccattatatttattgtttattttaggtcaaacccaagttagttcaatcctgattcatatttaatttgaagatagaaggtttgcagatattctctagtcatttgttaatatttcttcgtgatgacatatcacatgtcagccactgtgatagaggctgaggaatccaagaaaatggccagtaagatcaatgtgacggcagggaaatgtatgtgtgtctattttgtaactgtaaagatgaatgtcagttgttatttattgaaatgatttcacagtgtgtggtcaacatttctcatgttgaagctttaagaactaaaatgttctaaatatcccttggacattttatgtctttcttgtaaggcatactgccttgtttaatgttaattatgcagtgtttccctctgtgttagagcagagaggtttcgatatttattgatgttttcacaaagaacaggaaaataaaatatttaa

SEQ ID NO: 833 - DNA, 710 bp, Homo sapiens
  misc_feature: Incyte ID No: 902098.4
cacgtgttccactgcctcttctcttctcgcttgggaactccagtctcacctcggcttgcaatggaccccaactgctcctgcgaggctggtggctcctgcgcctgcgccggctcctgcaagtgcaaaaagtgcaaatgcacctcctgcaagaagagtgagtgcggggccatctccaggaatctggggctgtggctaaggttgggagggaacccaaggctggccctgagtgcctgcttcctttgtccccctaggccgtcactgcctttccagtcttctgctctgtccagggctcctgtggggctgggcagtctctcataggaagactcaccccaatatccaccagtcgtctcctgaaaaagctgtgccatcctgaactaaggatcctctggggctggagtctgagcttgagccaggcctgctgttgggagagggagctccctggtcaagtctgctgtgacttctctctccctttttccccagctgctgctcctgttgccccctgggctgtgccaagtgtgcccagggctgcatctgcaaaggggcgtcagagaagtgcagctgctgtgcctgatgtcgggacagccctgctgtcagatgaaaacagaatgacacgtaaaatccaggattttttttttctacaactccgactcatttgctacattcctttttttctgtgaaatatgtgaataataattaaacacttagacttg

SEQ ID NO: 834 - DNA, 725 bp, Homo sapiens
  misc_feature: Incyte ID No: 1184364.3
tgggttagcagtcgctccatttatcgcttgagatctccagccttaccgcggctcgaaatggtccccaactgctcctgcaccactggtgtctcctgcgcctgcaccggctcctgcaagtgcaaagagtgcaaatgcacctcctgcaagaagagtgagtgcggggccatctccaggaatctggggctgtggctgagattgggagggaacccaaggctggccctgagtgcatccttctggggaactgggctttctttgccctcattgcccgtgtcattccctctccaggctttctgccctaaattcagatggggcaggacagcatttttctcttgggacacaaatcccaactgtagcatctatggtttcagaacagagctgtgccagacgtaaaaagcttcctctgggtctgggttctgagctccagccaggcttgctattggggcagggcggtgcccggtcaagtctactgctacctctctctccccttcttccccaggctgctgctcctgctgccccgtgggctgtgccaagtgtgcccacggctgtgtctgcaaagggacgttggagaactgcagctgctgtgcctgatgtgggaacagctcttctcccagatgttaatagaacaagctgcacaacctggattttttttcaatacgatactgagccatttgctgcatttctttttatgttaaatatgtgagtgacaataaaacaattttgacttg

SEQ ID NO: 835 - DNA, 523 bp, Homo sapiens
  misc_feature: Incyte ID No: 1568230CB1
gcccagcccaggaacgcgggcggtgcggactcagcgggccgggtgcaggcgcggactgggcctctgcgcccggcccgacctccgtctataaatagagcagccagttgcagggctccattctgctttccgactgcctgactgcttgttcgtctcactggtgtgagctccagcatcccctttgctcgaaatggaccccaactgctcttgcgccactggtggctcctgcacgtgcgccggctcctgcaagtgcaaagagtgcaaatgcacctcctgcaagaagagctgctgttcctgctgccccgtgggctgtgccaagtgtgcccagggctgcgtctgcaaaggggcatcggagaagtgcagctgctgtgcctgatgtgggaacagctcttctcccagatgtaaatagaacaacctgcacaacctggatttttttaaaaatacaacactgagccatttgctgcatttctttttatactaaatatgtgactgacaataaaaacaattttgactttaaaaaaaaaaa

SEQ ID NO: 836 - DNA, 972 bp, Homo sapiens
  misc_feature: Incyte ID No: 010001CB1
cgggcggcgcaggagcggcactcgtggctgtggtggcttcggcagcggcttcagcagatcggcggcatcagcggtagcaccagcactagcagcatgttgagccgggcagtgtgcggcaccagcaggcagctggctccggctttggggtatctgggctccaggcagaagcacagcctccccgacctgccctacgactacggcgccctggaacctcacatcaacgcgcagatcatgcagctgcaccacagcaagcaccacgcggcctacgtgaacaacctgaacgtcaccgaggagaagtaccaggaggcgttggccaagggagatgttacagcccagatagctcttcagcctgcactgaagttcaatggtggtggtcatatcaatcatagcattttctggacaaacctcagccctaacggtggtggagaacccaaaggggagttgctggaagccatcaaacgtgactttggttcctttgacaagtttaaggagaagctgacggctgcatctgttggtgtccaaggctcaggttggggttggcttggtttcaataaggaacggggacacttacaaattgctgcttgtccaaatcaggatccactgcaaggaacaacaggccttattccactgctggggattgatgtgtgggagcacgcttactaccttcagtataaaaatgtcaggcctgattatctaaaagctatttggaatgtaatcaactgggagaatgtaactgaaagatacatggcttgcaaaaagtaaaccacgatcgttatgctgatcataccctaatgatcccagcaagataatgtcctgtcttctaagatgtgcatcaagcctggtacatactgaaaaccctataaggtcctggataatttttgtttgattattcattgaagaaacatttattttccaattgtgtgaagtttttgactgttaataaaagaatctgtcaaccatcaaaaaaaaaaa

SEQ ID NO: 837 - DNA, 817 bp, Homo sapiens
  misc_feature: Incyte ID No: 222838.1
agcagaggggctgagaccaaaccagaaacctccaattctcatgtggaagcccatgccctcaccctccaacatgaaagcctctggcagcacttctgtgtctggctgctcacagcagctgctttcagcccccaggggcttgctcagccagttgggattaatacttcaactacctgctgctacagatttatcaataagaaaatccctaagcagaggctggagagctacagaaggaccaccagtagccactgtccccgggaagctgtaatcttcaagaccaaactggacaaggagatctgtgctgaccccacacagaagtgggtccaggactttatgaagcacctggacaagaaaacccaaactccaaagctttgaacattcatgactgaactgaaaacaagccatgacttgagaaacaaataatttgtataccctgtcctttctcagagtggttctgagattattttaatctaattctaaggaatatgagctttatgtaataatgtgaatcatggtttttcttagtagattttaaaagttattaatattttaatttaatcttccatggattttggtgggttttgaacataaagccttggatgtatatgtcatctcagtgctgtaaaaactgtgggatgctcctcccttctctacctcatgggggtattgtataagtccttgcaagaatcagtgcaaagatttgctttaattgttaagatatgatgtccctatggaagcatattgttattatataattacatatttgcatatgtatgactcccaaattttcacataaaatagatttttgtataaaaaaaaa

SEQ ID NO: 838 - DNA, 832 bp, Homo sapiens
  misc_feature: Incyte ID No: 273061CB1
cggctcgagagaaacattgtgaaatctccaactcttaaccttcaacatgaaagtctctgcagtgcttctgtgcctgctgctcatgacagcagctttcaacccccagggacttgctcagccagatgcactcaacgtcccatctacttgctgcttcacatttagcagtaagaagatctccttgcagaggctgaagagctatgtgatcaccaccagcaggtgtccccagaaggctgtcatcttcagaaccaaactgggcaaggagatctgtgctgacccaaaggagaagtgggtccagaattatatgaaacacctgggccggaaagctcacaccctgaagacttgaactctgctacccctactgaaatcaagctggagtacgtgaaatgacttttccattctcctctggcctcctcttctatgctttggaatacttctaccataattttcaaataggatgcattcggttttgtgattcaaaatgtactatgtgttaagtaatattggctattatttgacttgttgctggtttggagtttatttgagtattgctgatcttttctaaagcaaggccttgagcaagtaggttgctgtctctaagcccccttcccttccactatgagctgctggcagtgggtttgtattcggttcccaggggttgagagcatgcctgtgggagtcatggacatgaagggatgctgcaatgtaggaaggagagctctttgtgaatgtgaggtgttgctaaatatgttattgtggaaagatgaatgcaatagtaggactgctgacattttgcagaaaatacattttatttaaaatctcctaaaaaaaaaaa

SEQ ID NO: 839 - DNA, 724 bp, Homo sapiens
  misc_feature: Incyte ID No: 1075405.1
  unsure 677, 710: a, t, c, g, or other
gtttccagacacgctggagacccagaatctggtctgtgcttcattcaccttagcttccagagacggtgactctgcagaggtaatgagtatcagggaaactcatgaccaggcatagcctattcagagtctaaaaggaggctcatagtggggctccccagctgatcttccctggtgctgatcatctggattattggtccgtcttaatgacacttgtaggcattatctagctttaacagctcctccttctctctgtccattatcaatgttatatacccattttacagcataggaaactgagtcattgggtcaaagatcacattctagctctgaggtataggcagaagcactgggatttaatgagctctttctcttctcctgcctgccttttgctttttcctcatgactcttttctgctcttaagatcagaataatccagttcatcctaaaatgctttttctttgtggtttattttccagatgcaatcaatgccccagtcacctgctggctataacttcaccaataggaaggatctcagtggcagaggctcgcgagctatagaaggaatcaccagcagcaagtgtcccaaagaagctgtgatcttcaagaccattgtggccaaggagatctgtgctgaccccaagcagaagtgggttcagggttccatggaccacctgggncaagcaaacccaaacttcgaggcttgaacactnacttcacaaaccca

SEQ ID NO: 840 - DNA, 1332 bp, Homo sapiens
  misc_feature: Incyte ID No: 1157025.1
gtcccgctgcgtgttttcctcttgatcgggaactcctgcttctccttgcctcgaaatggaccccaactgctcctgctcgcctggtaagggacacctagctccgcgccttgggatgcccgtttcccagccacagtacagactcttcctgggtttgaagaagtcgcatttaaagttctgagctgaaggggctcctttatttcgttaggtgctttcttcccgatcacgtccctgagaccacttctcgcctccctgtgcctctaagttagagttgagggtactgaggcccaaggctgtcctgctccatgtcacccagttggtcagggggctgctggctgagccccaatgctctgaccaggctctgagcagtcagggtggatgggaagtggggggccattgcctcttcggagttcaggacagaaggttctggcctcctgtcttagccttcctgggctgtgtctggagcctgggaccttgcttgtggggtaaaagcaacagaacacttgcccttcccaaaatgaagggagaggagatggggcttctcttcctctcccctgagtgggaaaggagctctgggggctggtccttcagcacagaggaggggtcactgaagcgttattgaccagctgctgtaccttctgcatctcactccacgctcactgcctttttctcttccttgcagttggctcctgtgcctgtgccggctcctgcaaatgcaaagagtgcaaatgcacctcctgcaagaagagggcagcccagagcttccctagccttccccagaactgctgtgtcagggatttgccccctgtgccggctgtgaagactttcctcatttaagggtaggttaaggggaactggcctccttttgttcctgtacccccaatcactacctgtccagtcttctgtcctgtcccagactcaggtggggctgggcagctttttcatataaaaccctcatcccaaagatctaccagttctcttctgacaaagccatgccatcctgaaatgatggtcctctggggctggaggcagggctcgagccaggcctctgttggggcagggaggtgcctgattgagtctgctctgacctctcactctccccttcttctccaggctgctgctcctgctgcccctgtgggctgtgccaagtgtgcccagggctgcatctgcaaagggacgtcagacaagtgcagctgctgtgcctgatgccaggacagctgtgctctcagatgtaaatagagcaacctatataaacctggatttttttttttttttttttgtacaaccctgacccgtttgctacatctttttttctatgaaatatgtgaatggcgc

SEQ ID NO: 841 - DNA, 2902 bp, Homo sapiens
  misc_feature: Incyte ID No: 2930605CB1
ggggactttcccaggggtggggcggcccggccaggcccccggcacttcctcgtcctcggcccgggtgccctgcccccgtccaggagccctaggagtgctacggggggccggagccttgcccgggccgctgccccgtccctggattcggggctggacgcagcaagcggggcgctgtgtccccaagctccccgtcctcggccaggcgggcaccacggcaggggctgagctaccctcatggaagggagaggaccgtaccggatctacgaccctgggggcagcgtgccctcaggagaggcatccgcagcttttgagcgcctagtgaaggagaattcccggctgaaggaaaaaatgcaagggataaagatgttaggggagcttttggaagagtcccagatggaagcgaccaggctccggcagaaggcagaggagctagtgaaggacaacgagctgctcccaccaccttctccctccttgggctccttcgaccccctggctgagctcacaggaaaggactcaaatgtcacagcatctcccacagcccctgcatgccccagtgacaagccagcaccagtccagaagcctccatccagtggcacctcctctgaatttgaagtggtcactcctgaggagcagaattcaccagagagcagcagccatgccaatgcgatggcgctgggccccctgccccgtgaggacggcaacctgatgctgcacctgcagcgcctggagaccacgctgagtgtgtgtgccgaggagccggaccacggccagctcttcacccacctgggccgcatggccctggagttcaaccgactggcatccaaggtgcacaagaatgagcagcgcacctccattctgcagaccctgtgtgagcagcttcggaaggagaacgaggctctgaaggccaagttggataagggcctggaacagcgggatcaggctgccgagaggctgcgggaggaaaatttggagctcaagaagttgttgatgagcaatggcaacaaagagggtgcgtctgggcggccaggctcaccgaagatggaagggacaggcaagaaggcagtggctggacagcagcaggctagtgtgacggcaggtaaggtcccagaggtggtggccttgggcgcagccgagaagaaggtgaagatgctggagcagcagcgcagtgagctgctggaagtgaacaagcagtgggaccagcatttccggtccatgaagcagcagtatgagcagaagatcactgagctgcgtcagaagctggctgatttgcagaagcaggtgactgacctggaggccgagcgggagcagaagcagcgtgactttgaccgcaagctcctcctggccaagtccaagattgaaatggaggagaccgacaaggagcagctgacagcagaggccaaggagctgcgccaaaaggtcaagtacctgcaggatcagctgagcccactcacccgacagcgtgagtaccaggaaaaggagatccagcggctcaacaaggccctggaggaagcactgagcatccaaaccccgccatcatctccaccaacagcatttgggagcccagaaggagcaggggccctcctaaggaaacaggagctggtcacgcagaatgagttgctgaaacagcaggtgaagatcttcgaggaggacttccagagggagcgcagtgatcgtgagcgcatgaatgaggagaaggaagagctgaagaagcaagtggagaagctgcaggcccaggtcaccctgtcaaatgcccagctaaaagcattcaaagatgaggagaaggcaagagaagccctcagacagcagaagaggaaagcaaaggcctcaggagagcgttaccatgtggagccccacccagaacatctctgcggggcctacccctacgcctacccgcccatgccagccatggtgccacaccatggcttcgaggactggtcccagatccgctacccccctccccccatggccatggagcacccgcccccactccccaactcgcgcctcttccatctgccggaatacacctggcgtctaccctgtggaggggttcgaaatccaaatcagagctcccaagtgatggaccctcccacagccaggcctacagaaccagagtctccaaaaaatgaccgtgaggggcctcagtgagaccagattgtgtcatttggctccaccttcatcttgcagagccagctgatctcagattgccaagaaactagaagccacttgcacggtgtggccagagcctcagctggatgagaggctgagatgggtggccagcttgtataccagtccctgaactgagctgtttacaggactggggaggctccacccagaaggctttcatttgtactctgctgggagtgactgggaaaaactccttccctgctgctgagtggagagaggcctcatccggctttgacccaccatccgttgcagaagcctccaggagcagcaatcctaagagtgggaggcagccaagacccccttccttcaaaacctcccggaagtggtttcaggccctctagttgccatgaccaatttgtgtgtgtgtttaatttttgcttcaagctctgtagcaggacctgccccacgcacacccctacccctctgtgaggagctgtgggaagtgtgggtttgtctccagaacagaagagaatgatggatattctggctctggggccctctccaccaccactcacagtagccttgctgaagccatcacagatgggagaaggccatgccagccacgtccgccgaggggcgccagcctgaagctgccaggccctgaggttcagaccctggaccccatagctggaggcctgtggtgccagaagcccagattagggtggctgtccatccctggatagctatttgcacgaatcatggacataaatccaagtag

SEQ ID NO: 842 - DNA, 3172 bp, Homo sapiens
  misc_feature: Incyte ID No: 410580.16
  unsure 2836, 2838: a, t, c, g, or other
acagctgtgtttggctgcagggccaagagcgctgtcaagaagacccacacgcccccctccagcagctgaattcctgcagctcagcagccgccgccaggagcaggacgaaccgccaatcgcaagggcacctctgagaacttcaggatgcagatgtctccagccctcacctgcctagtcctgggcctggcccttatctttggtgaagggtctgctgtgcaccatcccccatcctacgtggcccacctggcctcagacttcggggtgagggtgtttcaggcaggtggcgcaggcctccaaggaccgcaacgtggttttctcaccctatggggtggcctcggtgttggccatgctccagctgacaacaggaggagaaacccagcagcagattcaagcagctatgggattcaagattgatgacaagggcatggcccccgccctccggcatctgtacaaggagctcatggggccatggaacaaggatgagatcagcaccacagacgcgatcttcgtccagcgggatctgaagctggtccagggcttcatgccccacttcttcaggctgttccggagcacggtcaagcaagtggacttttcagaggtggagagagccagattcatcatcaatgactgggtgaagacacacacaaaaggtatgatcagcaacttgcttgggaaaggagccgtggaccagctgacacggctggtgctggtgaatgccctctacttcaacggccagtggaagactcccttccccgactccagcacccaccgccgcctcttccacaaatcagacggcagcactgtctctgtgcccatgatggctcagaccaacaagttcaactatactgagttcaccacgcccgatggccattactacgacatcctggaactgccctaccacggggacaccctcagcatgttcattgctgccccttatgaaaaagaggtgcctctctctgccctcaccaacattctgagtgcccagctcatcagccactggaaaggcaacatgaccaggctgccccgcctcctggttctgcccaagttctccctggagactgaagtcgacctcaggaagcccctagagaacctgggaatgaccgacatgttcagacagtttcaggctgacttcacgagtctttcagaccaagagcctctccacgtcgcgcaggcgctgcagaaagtgaagatcgaggtgaacgagagtggcacggtggcctcctcatccacagctgtcatagtctcagcccgcatggcccccgaggagatcatcatggacagacccttcctctttgtggtccggcacaaccccacaggaacagtccttttcatgggccaagtgatggaaccctgaccctggggaaagacgccttcatctgggacaaaactggagatgcatcgggaaagaagaaactccgaagaaaagaattttagtgttaatgactctttctgaaggaagagaagacatttgccttttgttaaaagatggtaaaccagatctgtctccaagaccttggcctctccttggaggacctttaggtcaaactccctagtctccacctgagaccctgggagagaagtttgaagcacaactcccttaaggtctccaaaccagacggtgacgcctgcgggaccatctggggcacctgcttccacccgtctctctgcccactcgggtctgcagacctggttcccactgaggccctttgcaggatggaactacggggcttacaggagcttttgtgtgcctggtagaaactatttctgttccagtcacattgccatcactcttgtactgcctgccaccgcggaggaggctggtgacaggccaaaggccagtggaagaaacaccctttcatctcagagtccactgtggcactggccacccctccccagtacaggggtgctgcaggtggcagagtgaatgtcccccatcatgtggcccaactctcctggcctggccatctccctccccagaaacagtgtgcatgggttattttggagtgtaggtgacttgtttactcattgaagcagatttctgcttccttttatttttataggaatagaggaagaaaggtcagatgcgtgcccagctcttcaccccccaatctcttggtggggaggggtgtacctaaatatttatcatatccttgcccttgagtgcttgttagagagaaagagaactactaaggaaaataatattatttaaactcgctcctagtgtttctttgtggtctgtgtcaccgtatctcaggaagtccagccacttgactggcacacacccctccggacatccagcgtgacggagcccacactgccaccttgtggccgcctgagaccctcgcgccccccgcgccccccgcgcccctctttttccccttgatggaaattgaccatacaatttcatcctccttcaggggatcaaaaggacggagtggggggacagagactcagatgaggacagagtggtttccaatgtgttcaatagatttaggagcagaaatgcaaggggctgcatgacctaccaggacagaactttccccaattacagggtgactcacagccgcattggtgactcacttcaatgtgtcatttccggctgctgtgtgtgagcagtggacacgtgaggggggggtgggtgagagagacaggcagctcggattcaactaccttagataatatttctgaaaacctaccagccagagggtagggcacaaagatggatgtaatgcactttgggaggccaaaggcggtaggattgcttgagcccagggagttcaagaccagcctgggcaacataccaagacccccgctctttaaaaatatatatattttnantatacttaaatatatatttctaatatctttaaatatatatatatattttaaagaccaatttatgggagaattgcacacagatgtgaaatgaatgtaatctaatagaagcctaatcagcccaccatgttctccactgaaaaatcctctttctttggggtttttctttctttcttttttgattttgcactggacggtgacgtcagccatgtacaggatccacaggggtggtgtcaaatgctattgaaattgtgttgaattgtatgctttttcacttttgataaataaacatgtaaaaatgtttcaaaaaaataataacaataaataaatacgaaaa

SEQ ID NO: 843 - DNA, 2079 bp, Homo sapiens
  misc_feature: Incyte ID No: 2643110CB1
ggtgcctgagccggcgggtcccctgtgtccgccgcggctgtcgtcccccgctcccgccacttccggggtcgcagtcccgggcatggagccgcgaccgtgaggcgccgctggacccgggacgacctgcccagtccggccgccgccccacgtcccggtctgtgtcccacgcctgcagctggaatggaggctctctggaccctttagaaggcacccctgccctcctgaggtcagctgagcggttaatgcggaaggttaagaaactgcgcctggacaaggagaacaccggaagttggagaagcttctcgctgaattccgagggggctgagaggatggccaccaccgggaccccaacggccgaccgatgcgacgcagccgccacagatgacccggccgcccgcttccaggtgcagaagcactcgtgggacgggctccggagcatcatccacggcagccgcaagtactcgggcctcattgtcaacaaggcgccccacgacttccagtttgtgcagaagacggatgagtctgggccccactcccaccgcctctactacctgggaatgccatatggcagccgagagaactccctcctctactctgagattcccaagaaggtccggaaagaggctctgctgctcctgtcctggaagcagatgctggatcatttccaggccacgccccaccatggggtctactctcgggaggaggagctgctgagggagcggaaacgcctgggggtcttcggcatcacctcctacgacttccacagcgagagtggcctcttcctcttccaggccagcaacagcctcttccactgccgcgacggcggcaagaacggcttcatggtgtcccctatgaaaccgctggaaatcaagacccagtgctcagggccccggatggaccccaaaatctgccctgccgaccctgacttcttctccttcatcaataacagcgacctgtgggtggccaacatcgagacaggcgaggagcggcggctgaccttctgccaccaaggtttatccaatgtcctggatgaccccaagtctgcgggtgtggccaccttcgtcatacaggaagagttcgaccgcttcactgggtactggtggtgccccacagcctcctgggaaggttcagagggcctcaagacgctgcgaatcctgtatgaggaagtcgatgagtccgaggtggaggtcattcacgtcccctctcctgcgctagaagaaaggaagacggactcgtatcggtaccccaggacaggcagcaagaatcccaagattgccttgaaactggctgagttccagactgacagccagggcaagatcgtctcgacccaggagaaggagctggtgcagcccttcagctcgctgttcccgaaggtggagtacatcgccagggccgggtggacccgggatggcaaatacgcctgggccatgttcctggaccggccccagcagtggctccagctcgtcctcctccccccggccctgttcatcccgagcacagagaatgaggagcagcggctagcctctgccagagctgtccccaggaatgtccagccgtatgtggtgtacgaggaggtcaccaacgtctggatcaatgttcatgacatcttctatcccttcccccaatcagagggagaggacgagctctgctttctccgcgccaatgaatgcaagaccggcttctgccatttgtacaaagtcaccgccgttttaaaatcccagggctacgattggagtgagcccttcagccccggggaaggtgagcagagcctgacgaatgctgtcgactcatcgcgttagtcacgtgtggttcaatatgctgtttgttcattggtcggcccccccactcagccagcacaccctgcgggagaaggaacagggatcggcaggaagccagccttccccagtgactgcatgatctggcagggcttagagcacccaactgttggcttattcaggcagcagatttactgagcacctcccctgtgccaggcccttagcacaaccaggggttggccacctacggcccacaggtcaaatccggcccaccacctgtgttcataaataaagttttattggc

SEQ ID NO: 844 - DNA, 1025 bp, Homo sapiens
  misc_feature: Incyte ID No: 039859.30
ggactggccctggctacgccaaggtggggctgacatgaagtccccttcatccgtggggggtggcccgtccctctgggaggggatccctcacaagatgacttcccaggtcgcgccccgaggcggctctttgctgcccccacagagatgacttccgggctcctggggcccgcggggaggggcaggtcggcaccatgcgccctgcagccctgcgcggggccctgctgggctgcctctgcctggcgttgctttgcctgggcggtgcggacaagcgcctgcgtgacaaccatgagtggaaaaaactaattatggttcagcactggcctgagacagtatgcgagaaaattcaaaacgactgtagagaccctccggattactggacaatacatggactatggcccgataaaagtgaaggatgtaatagatcgtggcccttcaatttagaagagattaaggatcttttgccagaaatgagggcatactggcctgacgtaattcactcgtttcccaatcgcagccgcttctggaagcatgagtgggaaaagcatgggacctgcgccgcccaggtggatgcgctcaactcccagaagaagtactttggcagaagcctggaactctacagggagctggacctcaacagtgtgcttctaaaattggggataaaaccatccatcaattactaccaagttgcagattttaaagatgcccttgccagagtatatggagtgatacccaaaatccagtgccttccaccaagccaggatgaggaagtacagacaattggtcagatagaactgtgcctcactaagcaagaccagcagctgcaaaactgcaccgagccgggggagcagccgtcccccaagcaggaagtctggctggcaaatggggccgccgagagccggggtctgagagtctgtgaagatggcccagtcttctatcccccacctaaaaagaccaagcattgatgcccaagttttggaaatattctgttttaaaaagcaagagaaattcacaaactgcagattcta

SEQ ID NO: 845 - DNA, 2349 bp, Homo sapiens
  misc_feature: Incyte ID No: 3699582CB1
ggagcaaaggcgccatggctgtggagtcccagggcggacgcccacttgtcctgggcctgctgctgtgtgtgctgggcccagtggtgtcccatgctgggaagatactgttgatcccagtggatggcagccactggctgagcatgcttggggccatccagcagctgcagcagaggggacatgaaatagttgtcctagcacctgacgcctcgttgtacatcagagacggagcattttacaccttgaagacgtaccctgtgccattccaaagggaggatgtgaaagagtcttttgttagtctcgggcataatgtttttgagaatgattctttcctgcagcgtgtgatcaaaacatacaagaaaataaaaaaggactctgctatgcttttgtctggctgttcccacttactgcacaacaaggagctcatggcctccctggcagaaagcagctttgatgtcatgctgacggaccctttccttccttgcagccccatcgtggcccagtacctgtctctgcccactgtattcttcttgcatgcactgccatgcagcctggaatttgaggctacccagtgccccaacccattctcctacgtgcccaggcctctctcctctcattcagatcacatgaccttcctgcagcgggtgaagaacatgctcattgccttttcacagaactttctgtgcgacgtggtttattccccgtatgcaacccttgcctcagaattccttcagagagaggtgactgtccaggacctattgagctctgcatctgtctggctgtttagaagtgactttgtgaaggattaccctaggcccatcatgcccaatatggtttttgttggtggaatcaactgccttcaccaaaatccactatcccaggaatttgaagcctacattaatgcttctggagaacatggaattgtggttttctctttgggatcaatggtctcagaaattccagagaagaaagctatggcaattgctgatgctttgggcaaaatccctcagacagtcctgtggcggtacactggaacccgaccatcgaatcttgcgaacaacacgatacttgttaagtggctaccccaaaacgatctgcttggtcacccgatgacccgtgcctttatcacccatgctggttcccatggtgtttatgaaagcatatgcaatggcgttcccatggtgatgatgcccttgtttggtgatcagatggacaatgcaaagcgcatggagactaagggagctggagtgaccctgaatgttctggaaatgacttctgaagatttagaaaatgctctaaaagcagtcatcaatgacaaaagttacaaggagaacatcatgcgcctctccagccttcacaaggaccgcccggtggagccgctggacctggccgtgttctgggtggagtttgtgatgaggcacaagggcgcgccacacctgcgccccgcagcccacgacctcacctggtaccagtaccattccttggacgtgattggtttcctcttggccgtcgtgctgacagtggccttcatcacctttaaatgttgtgcttatggctaccggaaatgcttggggaaaaaagggcgagttaagaaagcccacaaatccaagacccattgagaagtgggtgggaaataaggtaaaattttgaaccattccctagtcatttccaaacttgaaaacagaatcagtgttaaattcattttattcttattaaggaaatactttgcataaattaatcagccccagagtgctttaaaaaattctcttaaataaaaataatagactcgctagtcagtaaagatatttgaatatgtatcgtgccccctccggtgtctttgatcaggatgacatgtgccatttttcagaggacgtgcagacaggctggcattctagattacttttcttactctgaaacatggcctgtttgggagtgcgggattcaaaggtggtcccaccgctgcccctactgcaaatggcagttttaatcttatcttttggcttctgcagatggttgcaattgatccttaaccaataatggtcagtcctcatctctgtcctgcttcataggtgccaccttgtgtgtttaaagaagggaagctttgtacctttagagtgtaggtgaaatgaatgaatggcttggagtgcactgagaacagcatatgatttcttgctttggggaaaaagaatgatgctatgaaattggtgggtggtgtatttgagaagataatcattgcttatgtcaaatggagctgaatttgataaaaacccaaaatacagctatgaagtgctgggcaagtttactttttttctgatgtttcctacaactaaaaataaattaataaatttatag

SEQ ID NO: 846 - DNA, 1385 bp, Homo sapiens
  misc_feature: Incyte ID No: 480668.13
gggccacaggcagctccttgccagctctcctcctcgcacagccgctcgaaccgcctgctgagccccatggcccacgccacgctctccgccgcccccagcaatccccggctcctgcgggtggcgctgctgctcctgctcctggtggccgccagccggcgcgcagcaggtgggtcccggcgccctggggtccccgggccggacgcggctggggtgggcgccccgcgccgacagccccgctcaatcagcgagtctattcttccctaggagcgtccgtggtcactgaactgcgctgccagtgcttgcagacactgcagggaattcacctcaagaacatccaaagtgtgaatgtaaggtcccccggaccccactgcgcccaaaccgaagtcatgtaagtcccgccccgcgcttccgctgccaccgctggggtccccgactctcccgctgccccaaccctgtccccagcccgacctcctgtctcacggaattcccttctctctgcagagccacactcaagaatgggaagaaagcttgtctcaaccccgcatcccccatggttcagaaaatcatcgaaaagatactgaacaagtgagttgtaatttccatatacacaggcgactggagccgttggtcagaaatactggcatctgccccctaaaaataaaatcagggaaccccaagagttagctgaaggactagaaattgtgattattattttcacaattaaagttgccattaaggttattaatctgctctggtgccagaggatatttcagtatttcagtgtcttccatttccaggcctaacccctgggagggtaaatgtgggtttctagaatactaagtaaatttgactaacaatgccaaaatgccccctgcctgttttgggacgtttacctcagtccctaatgggcttcagacctgaaaaatgcaatgtctggtttgggcactttgggcctgtaagccttcttggtgaagagcagaaactttgcagtaacaccttcagtgagttcaaggctaggatccctgtcaacattatttaatctctttgagctttagcaaaatagggtagataatggtagttatttcatagggttgtgtgcagcttaagggagatcatgaatggacatttctaacccaatgtgacaatcagtgaccaatatgttttggctttttcaaaccaagaatctagttgagtccacagccacttctttcttgaaaaaaaaaaaaaaaaagcattcaggagtgcaagttttctgctatagagggcagtgggtacagacagaccttccctgagtggagggctgggagagagtctgcatggggacatccctccaagcaacttcagagtgacagaagagcagccttccttagcacctgcaacagtaa

SEQ ID NO: 847 - DNA, 493 bp, Homo sapiens
  misc_feature: Incyte ID No: 977891CB1
cgggcgggtgcaagcgcagggcagggcctctgcgcccggccccctcccctgagtagaaaagcagccgcagctgtggcgctccaccacgccgtccgggtgggcctagcagtcgctccatttatcgcttgagatctccagccttaccgcggctcgaaatggaccccaactgctcctgcaccactggtgtctcctgcgcctgcaccggctcctgcaagtgcaaagagtgcaaatgcacctcctgcaagaagagctgctgctcctgctgccccgtgggctgtgccaagtgtgcccacggctgtgtctgcaaagggacgttggagaactgcagctgctgtgcctgatgtgggaacagctcttctcccagatgttaatagaacaagctgcacaacctggattttttttcaatacgatactgagccatttgctgcatttctttttatgttaaatatgtgagtgacaataaaacaattttgacttgaaaaaaaaaaaaaaa

SEQ ID NO: 848 - DNA, 3356 bp, Homo sapiens
  misc_feature: Incyte ID No: 1091631.1
gccgctcgcccctccgccgctccggcccgggccgccatgtcgctgtggaagaaaaccgtctaccggagtctgtgcctggccctggccctgctcgtggccgtgacggtgttccaacgcagtctcacccctggtcagtttctgcaggagcctccgccacccaccctggagccacagaaggcccagaagccaaatggacagctggtgaaccccaacaacttctggaagaacccgaaagatgtggctgcgcccacgcccatggcctctcaggggccccaggcctgggacgtgaccaccactaactgctcagccaatatcaacttgacccaccagccctggttccaggtcctggagccgcagttccggcagtttctcttctaccgccactgccgctacttccccatgctgctgaaccacccggagaagtgcaggggcgatgtctacctgctggtggttgtcaagtcggtcatcacgcagcacgaccgccgcgaggccatccgccagacctggggccgcgagcggcagtccgcgggtgggggccgaggcgccgtgcgcaccctcttcctgctgggcacggcctccaagcaggaggagcgcacgcactaccagcagctgctggcctacgaagaccgcctctacggcgacatcctgcagtggggctttctcgacaccttcttcaacctgaccctcaaggagatccacttcctcaagtggctggacatctactgcccccacgtccccttcattttcaaaggcgacgatgacgtcttcgtcaaccccaccaacctgctagaatttctggctgaccggcagccacaggaaaacctgttcgtgggcgatgtcctgcagcacgctcggcccattcgcaggaaagacaacaaatactacatcccgggggccctgtacggcaaggccagctatccgccgtatgcaggcggcggtggcttcctcatggccggcagcctggcccggcgcctgcaccatgcctgcgacaccctggagctctacccgatcgacgacgtctttctgggcatgtgcctggaggtgctgggcgtgcagcccacggcccacgagggcttcaagactttcggcatctcccggaaccgcaacagccgcatgaacaaggagccgtgctttttccgcgccatgctcgtggtgcacaagctgctgccccctgagctgctcgccatgtgggggctggtgcacagcaatctcacctgctcccgcaagctccaggtgctctgaccccagccgggctactaggacaggccagggcacttgctcctgagcccccatggtattggggctggagccacagtgcccaggcctagcctttggtccccaaggggaggtggagggttgaggcctacgtgccactgggtgtggtggggtgcaggtagccagaaagggacctccctgtgtggataattctaggaaactgaggcccaggaacggttggagctgcccagtctggaggccctctctgaggagcgaggcgccaggccctggcagccctcctgacctgggtccgttgctggccccctcagatgtggtgggaggtcctggtgacctctggaggaacgctgtgctcaggtacctgggctaggcctggcctgatgggtctgtggccgcccctcgtcttcacagggaagagtcttctgtgaaatgcctcagtctccccagaggccgggcggccctggcaggagaaactcaaccctgtgcgggctcacaggcaccccccagtccacaccctggtctcctgggagagagggcccagccggctctccgcagccccaggcctgcctggagacgggccgcctctgccacagggcctccactcctggctgtgtcctgtaaggtctggaagggcgaccgctctgactacctcagcgcccctcagaatctccctggggctgcagccctaccccaccccgacacagggcagaagagcagcgctcctggccccccgaagtcccagagctgctgacccccaccccaggcaagtctctcccgcagcccccacacccccaggcctggctccctggctggaaagcagccggtttggcctggaagtggacattcctctattactgtgaagttttatttatgaagaatttggagggagaaggctccaggcttcaggagggggtggtgtcctccctggccctcctcccttccctcccctcattccagctgcctgccctcagcacccccaggcccctcacagcccagccccctccagagccctgccccaccgcaccctgcttctccagggcctagcagaccagcatctgccccggtgaagggatggatcagctgtgggggtgggtgcagaaggttgccacctcctacctcagcgggagtcacctaggaaagatggagggattgacactattttctcaataaaatgggactttttttttttttttttttttttttggtgtgaaacttcctgttcccagctgcatcagagagcctgtctggggccaaggttgccagagatttctgaagacacagcttgttccttgttcttggctggtgggtgcacaaggacttctggaagggatttagacggggctgagtgctaggattaaagtggggatgggagtacggcaacagaaaaacctgggagctagcaatgcacccagcccttgactgtgccctggtggacagccgagctgtggctctagcgtgagccagtgccttcctgtccctgccaagggtgaggccagagttggccccgaggctaatgtttcagtgggtgagattaggtcggccgtacagaggccggtgggctccctgacatcccttccaggcaacctgaaagcactgaaatagcttatggccctgtgccagggaccttggcccaagctgctgacctccagggtggggagggagctacccccaggagaagagtcactcagacagcagtatgagcaagccagccagcagctccgtgcctgcacccagctcaggggaatcccagggggttcagatgcccaggaaggaaaaggggacagcgctactgctatggaatgagaccaccacttctcctgttgtccttcccagcttctccccaacctccccttttccctagtttataagacaggagaaaagggagaaagcaaaaagctggaaagaaacagaagtaagataaatagctagacgaccttggcgccaccacctggccctggtggttaaaatgataataatattaacccctgaccaaaacgactggtgttatctgtaaatcccagacattgtgtgagaaagcaccgtaaaactttttgtcctattagctgatgtgtgtagcccccagtcacgttcctcacgcttacttgatctattatgaccctttg

SEQ ID NO: 849 - DNA, 706 bp, Homo sapiens
  misc_feature: Incyte ID No: 1093446.1
cctagttccaaatgttttcattatctccccccaacaaaacccatacctatcaagctgtcactccccataccccattctctttttcatctcagcccctgtcaatctggtttttgtccttatggacttaccaattctgaatatttcctataaacagaatcacacaatatttgattttttttttaaaactaagccttgctctgtctcccaggctggagtgctgtggcgtgattttggttcactgcaacctccgccttccaagttcaagagattctcctgcctcagcttccaagtagctgggattacaggcatgtggtaccacgcctggctaattttcttgtatttttagtagggacatgttggccaggctggttgtgagctcctggcctcaggtgatccacacgcctcagtgtcccagagtgctgatattacaggcgtaatatgtgatcttttgtgtctggttcctttcacgttgaacgctatttttgaggttcgtgcctgttgtagaccacagtcacacactgctgtagtcttcccccatcctcattcccagctgcctcctcctactgtttccgtctatcaaaaagcctccttggcgcaggttccctgagctgtgggattctgcactggtgctttggattccctgatatgttccttcaaatccactgagaattaaataaacatcgctaaagcatgacctccccacgtc

SEQ ID NO: 850 - DNA, 231 bp, Homo sapiens
  misc_feature: Incyte ID No: 021968.1
ctcgtgccggtcaattatgagttcctttatttattggtgagaaagattagcaagtatgacgtatgcaaggaatagaagttatgtaccgagtggttaaaggttggggggatatggagatggatgagagggagctgtctgggaaggctttgcttcacttggattagagtagggttgcgtgaggaaataggtgtgtagaatgagaatgagggtcatgacatcctcctacaaaac

What is claimed is:

1. A combination comprising a plurality of cDNAs that are differentially expressed in activated vascular tissue, wherein the cDNAs are SEQ ID NOs: 1-850 or their complements.

2. The combination of claim 1, wherein each of the cDNAs is differentially expressed at least 2.5-fold in activated vascular endothelium and is selected from the group consisting of SEQ ID NOs: 1-205, 438-760, and 813-850.

3. The combination of claim 1, wherein each of the cDNAs is differentially expressed at least 2.5-fold in activated vascular smooth muscle and is selected from the group consisting of SEQ ID NOs: 1-15, 206-461, and 761-850.

4. The combination of claim 1, wherein each of the cDNAs is differentially expressed at least 2.5-fold in activated vascular endothelium and smooth muscle and is selected from the group consisting of SEQ ID NOs: 1-15 and 813-850.

5. The combination of claim 1, wherein the cDNAs are immobilized on a substrate.

6. A high throughput method for detecting differential expression of one or more cDNAs in a sample containing nucleic acids, the method comprising:
a) hybridizing the combination of claim 1 with nucleic acids of the sample, thereby forming one or more hybridization complexes;
b) detecting the hybridization complexes; and
c) comparing the hybridization complexes with those of a standard, wherein differences between the standard and sample hybridization complexes indicate differential expression of cDNAs in the sample.

7. The method of claim 6, wherein the nucleic acids of the sample are amplified prior to hybridization.

8. A high throughput method of screening a plurality of molecules or compounds to identify a molecule or compound which specifically binds a cDNA of the combination, the method comprising:
a) comtacting the combination of claim 1 with the plurality of molecules or compounds under conditions to allow specific binding; and
b) detecting specific binding between a cDNA and at least one molecule or compound, thereby identifying a ligand that specifically binds to a cDNA.

9. The method of claim 8 wherein the plurality of molecules or compounds are selected from DNA molecules, RNA molecules, peptide nucleic acid molecules, mimetics, peptides, transcription factors, repressors, and regulatory proteins.

10. An isolated cDNA selected from SEQ ID NOs: 13-15, 170-205, 372-437, 669-760, 794-812, and 846-850.

11. A vector containing the cDNA of claim 10.

12. A host cell containing the vector of claim 11.

13. A method for producing a protein, the method comprising the steps of:
a) culturing the host cell of claim 12 under conditions for expression of protein; and
b) recovering the protein from the host cell culture.

14. A protein or a portion thereof produced by the method of claim 13.

15. A high-throughput method for using a protein to screen a plurality of molecules or compounds to identify at least one ligand which specifically binds the protein, the method comprising:
a) combining the protein of claim 14 with the plurality of molecules or compounds under conditions to allow specific binding; and
b) detecting specific binding between the protein and a molecule or compound, thereby identifying a ligand which specifically binds the protein.

16. The method of claim 15 wherein the plurality of molecules or compounds is selected from DNA molecules, RNA molecules, peptide nucleic acid molecules, mimetics, peptides, proteins, agonists, antagonists, antibodies or their fragments, immunoglobulins, inhibitors, drug compounds, and pharmaceutical agents.

17. A method of using a protein to produce and purify an antibody, the method comprising:
a) immunizing an animal with the protein of claim 14 under conditions to elicit an antibody response;
b) isolating animal antibodies;
c) contacting the isolated antibodies with the protein; thereby forming protein:antibody complex;
d) dissociating the protein from the complex; and
e) collecting purified antibody

18. A purified antibody produced by the method of claim 17.

19. A method for using an antibody to detect a protein in a sample comprising:
a) combining the antibody of claim 18 with a sample under conditions to allow specific binding; and
b) detecting specific binding, wherein specific binding indicates the presence of the protein in the sample.

20. A method of using an antibody to purify a natural or recombinant protein from a sample, the method comprising:
a) combining the antibody of claim 18 with a sample under conditions to allow specific binding; and
b) separating the antibody from the protein, thereby obtaining purified protein.
